(19) United States
(12) Patent Application Publication
(10) Pub. No.: US 2019/0000923 A1
(43) Pub. Date: Jan. 3, 2019

(54) METHODS OF TREATING OR AMELIORATING METABOLIC DISORDERS USING GROWTH DIFFERENTIATION FACTOR 15 (GDF-15)

(71) Applicant: NOVARTIS AG, Basel (CH)

(72) Inventors: William CHUTKOW, Needham, MA (US); John Richard Neville HADCOCK, Dedham, MA (US); Kurt Alex HELDWEIN, Belmont, MA (US); Aimee Richardson USERA, Winchester, MA (US)

(21) Appl. No.: 16/064,054

(22) PCT Filed: Dec. 20, 2016
(86) PCT No.: PCT/IB2016/057839

§ 371 Date: Jun. 20, 2018

Related U.S. Application Data
(60) Provisional application No. 62/270,967, filed on Dec. 22, 2015.

(51) Int. Cl. A61K 38/19; A61P 1/16; A61K 47/54; A61K 47/60

(52) U.S. Cl. CPC A61K 38/19; A61K 47/60; A61K 47/542; A61P 1/16

(57) ABSTRACT

The disclosure relates to the treatment of non-alcoholic fatty liver disease (NAFLD) and non-alcoholic steatohepatitis (NASH), as well as end-stage liver disease, hepatic steatosis (fatty liver), liver fibrosis, liver inflammation, liver cirrhosis, primary biliary cirrhosis (PBC), and hepatocellular carcinoma (HCC), by administering to a subject in need a GDF15 protein or a functional variant, mutation, fusion, or conjugate thereof, and to pharmaceutical compositions that contain the same.

### CROSS-REFERENCE TO RELATED APPLICATIONS

[0001] This application claims the benefit of U.S. Provisional Application No. 62/270,967 filed on Dec. 22, 2015, which is hereby incorporated by reference in its entirety.

### SEQUENCE LISTING

[0002] The instant application contains a Sequence Listing which has been submitted electronically in ASCII format and is hereby incorporated by reference in its entirety. Said ASCII copy, created on Dec. 16, 2016, is named PAT057168-WO-PCT_SL.txt and is 920,254 bytes in size.

### FIELD

[0003] This invention relates to the treatment of non-alcoholic fatty liver disease (NAFLD) and non-alcoholic steatohepatitis (NASH), as well as related conditions that include but are not limited to alcoholic steatohepatitis (ASH), end-stage liver disease, hepatic steatosis (fatty liver), liver fibrosis, liver inflammation, liver cirrhosis, primary biliary cirrhosis (PBC), and hepatocellular carcinoma (HCC).

### BACKGROUND

[0004] Non-alcoholic fatty liver disease (NAFLD) is a disorder affecting as many as 1 in 3-5 adults and 1 in 10 children in the United States, and refers to conditions where there is an accumulation of excess fat in the liver of people who drink little or no alcohol. The most common form of NAFLD is a non-serious condition called hepatic steatosis (fatty liver), in which fat accumulates in the liver cells; although not a physiologically normal condition, hepatic steatosis by itself likely does not damage the liver.

[0005] NAFLD most often presents itself in individuals with a constellation of risk factors termed “metabolic syndrome,” which is characterized by elevated fasting plasma glucose (FPG) with or without intolerance to post-prandial glucose, being overweight or obese, high blood lipids such as cholesterol and triglycerides (TGs) and low high-density lipoprotein cholesterol (HDL-C) levels, and high blood pressure. Not all NAFLD patients have all the manifestations of the metabolic syndrome.

[0006] Obesity is thought to be the most common cause of NAFLD and some experts estimate that about two-thirds of obese adults and one-half of obese children may have hepatic steatosis. The majority of individuals with NAFLD have no symptoms and a normal physical examination (although the liver may be slightly enlarged); children may exhibit symptoms such as abdominal pain and fatigue, and may show patchy dark skin discoloration (acanthosis nigricans). A diagnosis of NAFLD is usually first suspected in an overweight or obese person who is found to have mild elevations in their liver blood tests during routine testing; NAFLD can be present with normal liver blood tests, however, or incidentally detected on imaging investigations such as abdominal ultrasound or CT scan. It is confirmed by imaging studies, most commonly a liver ultrasound or magnetic resonance imaging (MRI), and exclusion of other causes.

[0007] Some people with NAFLD may develop a more serious condition called non-alcoholic steatohepatitis (NASH): about 2-5 percent of adult Americans and up to 20 percent of those who are obese may suffer from NASH. In NASH, fat accumulation in the liver is associated with inflammation and different degrees of scarring. NASH is a potentially serious condition that carries a substantial risk of progression to end-stage liver disease, cirrhosis and hepatocellular carcinoma. Some patients who develop cirrhosis are at risk of liver failure and may eventually require a liver transplant.

[0008] NAFLD may be differentiated from NASH by the NAFLD Activity Score (NAS), the sum of the histopathology scores of a liver biopsy for steatosis (0 to 3), lobular inflammation (0 to 2), and hepatocellular ballooning (0 to 2). A NAS of <3 corresponds to NAFLD, 3-4 corresponds to borderline NASH, and >5 corresponds to NASH. The biopsy is also scored for fibrosis (0 to 4).

There are no drugs currently approved to prevent or treat NAFLD or NASH. A number of pharmacological interventions have been tried in NAFLD/NASH but with overall limited benefit.

### SUMMARY

[0009] The present invention relates to methods for treating non-alcoholic fatty liver disease (NAFLD) and non-alcoholic steatohepatitis (NASH), as well as related conditions that include but are not limited to alcoholic steatohepatitis (ASH), said method comprising administering to the subject in need thereof an effective amount of a GDF15 fusion polypeptide or GDF15 conjugate, e.g., a GDF15 fatty acid conjugate (usually in the form of a pharmaceutical composition) as described herein. In some aspects, the invention relates to methods for treating non-alcoholic fatty liver disease (NAFLD) and non-alcoholic steatohepatitis (NASH), as well as end-stage liver disease, hepatic steatosis (fatty liver), liver fibrosis, liver inflammation, liver cirrhosis, primary biliary cirrhosis (PBC), and hepatocellular carcinoma (HCC) in a subject in need thereof, said method comprising administering to the subject in need thereof an effective amount of a GDF15 fusion polypeptide (usually in the form of a pharmaceutical composition) as described herein.

[0010] In some embodiments, the methods of the invention comprise a portion of the wild type GDF15 full length protein, e.g., having NCBI reference sequence number NP_004855.2, and encoded by the polynucleotide sequence which has NCBI reference sequence number NM_004864.2, and found in such published patent applications as, e.g., WO97/00958, assigned to St. Vincents Hospital. By way of non-limiting example, in some embodiments, the methods of the invention comprise the mature GDF15 protein, i.e., amino acid residues 198-308 of the wild type GDF15 full length protein. In other embodiments, the methods of the invention comprise smaller fragments, domains, and/or regions of full length GDF15 protein.

[0011] In some embodiments, the methods of the invention comprise variants or mutations of the GDF15 protein sequence, e.g., biologically active GDF15 variants, and can include truncated versions of the GDF15 protein (in which residues from the C- and/or N-terminal regions have been eliminated, thereby shortening/truncating the protein), as well as variants with one or more point substitutions, deletions, and/or site-specific incorporation of amino acids at positions of interest (e.g., with conservative amino acid residues, with non-conservative residues, or with non-natural amino acid residues such as pyrrolysine). The terms “variant” and “mutant” are used interchangeably and are further defined herein.

[0012] In some embodiments, the methods of the invention comprise GDF15 fusion protein sequences, such as Fc fusions, or serum albumin (SA) fusions. The terms “fusion protein,” “fusion polypeptide,” and “fusions” are used interchangeably and are further defined herein. In still other embodiments, the methods of the invention comprise conjugations of GDF15 and fatty acids. Said conjugates and fusions may be intended to extend the half-life of the GDF15 moiety, in addition to serving as therapeutic agents for the conditions listed herein. In some embodiments, the conjugates and fusions used in the methods of the inventions comprise wild type GDF15; in other embodiments, the conjugates and fusions comprise variant GDF15 sequences relative to the wild type full length or mature protein.

[0013] Representative examples of said GDF15 variants, conjugates, and fusions are described, e.g., in PCT Publications WO13/148117 and WO14/120619 and all related patent family members (including but not limited to U.S. Pat. No. 9,161,966B1); and in PCT Publications WO2012/138919, WO13/113008, and WO15/017710, and all related patent family members. In all cases, representative examples of said GDF15 variants, conjugates, and fusions may be found in any related applications, issued patents, and family members of the above, both in the US and in the rest of the world. The contents of all of the above, as well as of any related applications, issued patents, and family members, are hereby incorporated herein by reference in their entirety. Specific embodiments can be found in the following table (Table 1):

TABLE 1
GDF15 Variants and fusion proteins

| | SEQ ID | |
|---|---|---|
| Description | NO: | SEQUENCE |
| Full-length | 2 | MPGQELRTVN GSQMLLVLLV LSWLPHGGAL SLAEASRASF PGPSELHSED |
| human GDF15 | | SRFRELRKRY EDLLTRLRAN QSWEDSNTDL VPAPAVRILT PEVRLGSGGH |
| | | LHLRISRAAL PEGLPEASRL HRALFRLSPT ASRSWDVTRP LRRQLSLARP |
| | | QAPALHLRLS PPPSQSDQLL AESSSARPQL ELHLRPQAAR GRRRARARNG |
| | | DHCPLGPGRC CRLHTVRASL EDLGWADWVL SPREVQVTMC IGACPSQFRA |
| | | ANMHAQIKTS LHRLKPDTVP APCCVPASYN PMVLIQKTDT GVSLQTYDDL |
| | | LAKDCHCI |
| Full-length | 3 | MKWVTFISLLFLFSSAYSRGVFRRDAHKSEVAHRFKDLGEENFKALVLIAFAQYLQQCPF |
| human serum | | EDHVKLVNEVTEFAKTCVADESAENCDKSLHTLFGDKLCTVATLRETYGEMADCCAKQEP |
| albumin | | ERNECFLQHKDDNPNLPRLVRPEVDVMCTAFHDNEETFLKKYLYEIARRHPYFYAPELLF |
| | | FAKRYKAAFTECCQAADKAACLLPKLDELRDEGKASSAKQRLKCASLQKFGERAFKAWAV |
| | | ARLSQRFPKAEFAEVSKLVTDLTKVHTECCHGDLLECADDRADLAKYICENQDSISSKLK |
| | | ECCEKPLLEKSHCIAEVENDEMPADLPSLAADFVESKDVCKNYAEAKDVFLGMFLYEYAR |
| | | RHPDYSVVLLLRLAKTYETTLEKCCAAADPHECYAKVFDEFKPLVEEPQNLIKQNCELFE |
| | | QLGEYKFQNALLVRYTKKVPQVSTPTLVEVSRNLGKVGSKCCKHPEAKRMPCAEDYLSVV |
| | | LNQLCVLHEKTPVSDRVTKCCTESLVNRRPCFSALEVDETYVPKEFNAETFTFHADICTL |
| | | SEKERQIKKQTALVELVKHKPKATKEQLKAVMDDFAAFVEKCCKADDKETCFAEEGKKLV |
| | | AASQAALGL |
| Mature | 4 | DAHKSE VAHRFKDLGE ENFKALVLIA FAQYLQQCPF EDHVKLVNEV |
| HSA(25-609) | | TEFAKTCVAD ESAENCDKSL HTLFGDKLCT VATLRETYGE MADCCAKQEP |
| | | ERNECFLQHK DDNPNLPRLV RPEVDVMCTA FHDNEETFLK KYLYEIARRH |
| | | PYFYAPELLF FAKRYKAAFT ECCQAADKAA CLLPKLDELR DEGKASSAKQ |
| | | RLKCASLQKF GERAFKAWAV ARLSQRFPKA EFAEVSKLVT DLTKVHTECC |
| | | HGDLLECADD RADLAKYICE NQDSISSKLK ECCEKPLLEK SHCIAEVEND |
| | | EMPADLPSLA ADFVESKDVC KNYAEAKDVF LGMFLYEYAR RHPDYSVVLL |
| | | LRLAKTYETT LEKCCAAADP HECYAKVFDE FKPLVEEPQN LIKQNCELFE |
| | | QLGEYKFQNA LLVRYTKKVP QVSTPTLVEV SRNLGKVGSK CCKHPEAKRM |
| | | PCAEDYLSVV LNQLCVLHEK TPVSDRVTKC CTESLVNRRP CFSALEVDET |
| | | YVPKEFNAET FTFHADICTL SEKERQIKKQ TALVELVKHK PKATKEQLKA |
| | | VMDDFAAFVE KCCKADDKET CFAEEGKKLV AASQAALGL |
| Mature | 5 | ARNGDHCPLG PGRCCRLHTV RASLEDLGWA DWVLSPREVQ VTMCIGACPS |
| GDF15(197- | | QFRAANMHAQ IKTSLHRLKP DTVPAPCCVP ASYNPMVLIQ KTDTGVSLQT |
| 308) | | YDDLLAKDCH CI |
| Mature | 6 | HHHHHHARNG DHCPLGPGRC CRLHTVRASL EDLGWADWVL SPREVQVTMC |
| 6xHis- | | IGACPSQFRA ANMHAQIKTS LHRLKPDTVP APCCVPASYN PMVLIQKTDT |
| GDF15(197- | | GVSLQTYDDL LAKDCHCI |
| 308) | | |
| Mature | 7 | HHHHHHHHGG SENLYFQGAR NGDHCPLGPG RCCRLHTVRA SLEDLGWADW |
| 6xHis-TEV- | | VLSPREVQVT MCIGACPSQF RAANMHAQIK TSLHRLKPDT VPAPCCVPAS |
| GDF15(197- | | YNPMVLIQKT DTGVSLQTYD DLLAKDCHCI |
| 308) | | |
| Mature M- | 8 | MHHHHHHQKP VGVEEPVYDT AGRPLFGNPS EVHPQSTLKL PHDRGEDDIE |
| 6xHis- | | TTLRDLPRKG DCRSGNHLGP VSGIYIKPGP VYYQDYTGPV YHRAPLEFFD |
| GDF15(197- | | ETQFEETTKR IGRVTGSDGK LYHIYVEVDG EILLKQAKRG TPRTLKWTRN |
| 308) | | TTNCPLWVTS CARNGDHCPL GPGRCCRLHT VRASLEDLGW ADWVLSPREV |
| | | QVTMCIGACP SQFRAANMHA QIKTSLHRLK PDTVPAPCCV |
| | | PASYNPMVLI QKTDTGVSLQ TYDDLLAKDC HCI |
| Full-length | 9 | EAHKSEIAHR YNALGEQHFK GLVLIAFSQY LQKASYDEHA KLVQEVTDFA |
| Murine serum | | KTCVADESAA NCDKSLHTLF GDKLCAIPNL RENYGELADC CTKQEPERNE |
| albumin MSA- | | CFLQHKDDNP SLPPFERPEA EAMCTSFKEN PTTFMGHYLH EVARRHPYFY |
| GDF15 fusion | | APELLYYAEQ YNEILTQCCA EADKESCLTP KLDGVKEKAL VSSVRQRMKC |
| protein(197- | | SSMQKFGERA FKAWAVARLS QTFPNADFAE ITKLATDLTK VNKECCHGDL |
| 308) | | LECADDRAEL AKYMCENQAT ISSKLQTCCD KPLLKKAHCL SEVEHDTMPA |
| | | DLPAIAADFV EDQEVCKNYA EAKDVFLGTF LYEYSRRHPD YSVSLLLRLA |
| | | KKYEATLEKC CAEANPPACY GTVLAEFQPL VEEPKNLVKT NCDLYEKLGE |
| | | YGFQNAILVR YTQKAPQVST PTLVEAARNL GRVGTKCCTL PEDQRLPCVE |
| | | DYLSAILNRV CLLHEKTPVS EHVTKCCSGS LVERRPCFSA LTVDETYVPK |
| | | EFKAETFTFH SDICTLPEKE KQIKKQTALA ELVKHKPKAT AEQLKTVMDD |
| | | FAQFLDTCCK AADKDTCFST EGPNLVTRAK DALAGGGGSG GGGSGGGGSA |
| | | RNGDHCPLGP GRCCRLHTVR ASLEDLGWAD WVLSPREVQV TMCIGACPSQ |
| | | FRAANMHAQI KTSLHRLKPD TVPAPCCVPA SYNPMVLIQK TDTGVSLQTY |
| | | DDLLAKDCHC I |
| Full-length | 10 | EAHKSEIAHR YNALGEQHFK GLVLIAFSQY LQKASYDEHA KLVQEVTDFA |
| Murine serum | | KTCVADESAA NCDKSLHTLF GDKLCAIPNL RENYGELADC CTKQEPERNE |
| albumin MSA- | | CFLQHKDDNP SLPPFERPEA EAMCTSFKEN PTTFMGHYLH EVARRHPYFY |
| GDF15 fusion | | APELLYYAEQ YNEILTQCCA EADKESCLTP KLDGVKEKAL VSSVRQRMKC |
| protein(211- | | SSMQKFGERA FKAWAVARLS QTFPNADFAE ITKLATDLTK VNKECCHGDL |
| 308) | | LECADDRAEL AKYMCENQAT ISSKLQTCCD KPLLKKAHCL SEVEHDTMPA |
| | | DLPAIAADFV EDQEVCKNYA EAKDVFLGTF LYEYSRRHPD YSVSLLLRLA |
| | | KKYEATLEKC CAEANPPACY GTVLAEFQPL VEEPKNLVKT NCDLYEKLGE |
| | | YGFQNAILVR YTQKAPQVST PTLVEAARNL GRVGTKCCTL PEDQRLPCVE |
| | | DYLSAILNRV CLLHEKTPVS EHVTKCCSGS LVERRPCFSA LTVDETYVPK |
| | | EFKAETFTFH SDICTLPEKE KQIKKQTALA ELVKHKPKAT AEQLKTVMDD |
| | | FAQFLDTCCK AADKDTCFST EGPNLVTRAK DALAGGGGSG GGGSGGGGSC |
| | | RLHTVRASLE DLGWADWVLS PREVQVTMCI GACPSQFRAA NMHAQIKTSL |
| | | HRLKPDTVPA PCCVPASYNP MVLIQKTDTG VSLQTYDDLL AKDCHCI |
| HSA(25- | 11 | DAHKSEVAHR FKDLGEENFK ALVLIAFAQY LQQSPFEDHV KLVNEVTEFA |
| 609)(C34S)(N503Q)- | | KTCVADESAE NCDKSLHTLF GDKLCTVATL RETYGEMADC CAKQEPERNE |
| GDF15(211- | | CFLQHKDDNP NLPRLVRPEV DVMCTAFHDN EETFLKKYLY EIARRHPYFY |
| 308) | | APELLFFAKR YKAAFTECCQ AADKAACLLP KLDELRDEGK ASSAKQRLKC |
| | | ASLQKFGERA FKAWAVARLS QRFPKAEFAE VSKLVTDLTK VHTECCHGDL |
| | | LECADDRADL AKYICENQDS ISSKLKECCE KPLLEKSHCI AEVENDEMPA |
| | | DLPSLAADFV ESKDVCKNYA EAKDVFLGMF LYEYARRHPD YSVVLLLRLA |
| | | KTYETTLEKC CAAADPHECY AKVFDEFKPL VEEPQNLIKQ NCELFEQLGE |
| | | YKFQNALLVR YTKKVPQVST PTLVEVSRNL GKVGSKCCKH PEAKRMPCAE |
| | | DYLSVVLNQL CVLHEKTPVS DRVTKCCTES LVNRRPCFSA LEVDETYVPK |
| | | EFQAETFTFH ADICTLSEKE RQIKKQTALV ELVKHKPKAT KEQLKAVMDD |
| | | FAAFVEKCCK ADDKETCFAE EGKKLVAASQ AALGLGGGGS GGGGSGGGGS |
| | | CRLHTVRASL EDLGWADWVL SPREVQVTMC IGACPSQFRA ANMHAQIKTS |
| | | LHRLKPDTVP APCCVPASYN PMVLIQKTDT GVSLQTYDDL LAKDCHCI |
| MSA- | 12 | EAHKSEIAHR YNALGEQHFK GLVLIAFSQY LQKASYDEHA KLVQEVTDFA |
| GDF15(197- | | KTCVADESAA NCDKSLHTLF GDKLCAIPNL RENYGELADC CTKQEPERNE |
| 308)(C203S) | | CFLQHKDDNP SLPPFERPEA EAMCTSFKEN PTTFMGHYLH EVARRHPYFY |
| (C210S) | | APELLYYAEQ YNEILTQCCA EADKESCLTP KLDGVKEKAL VSSVRQRMKC |
| | | SSMQKFGERA FKAWAVARLS QTFPNADFAE ITKLATDLTK VNKECCHGDL |
| | | LECADDRAEL AKYMCENQAT ISSKLQTCCD KPLLKKAHCL SEVEHDTMPA |
| | | DLPAIAADFV EDQEVCKNYA EAKDVFLGTF LYEYSRRHPD YSVSLLLRLA |
| | | KKYEATLEKC CAEANPPACY GTVLAEFQPL VEEPKNLVKT NCDLYEKLGE |
| | | YGFQNAILVR YTQKAPQVST PTLVEAARNL GRVGTKCCTL PEDQRLPCVE |
| | | DYLSAILNRV CLLHEKTPVS EHVTKCCSGS LVERRPCFSA LTVDETYVPK |
| | | EFKAETFTFH SDICTLPEKE KQIKKQTALA ELVKHKPKAT AEQLKTVMDD |
| | | FAQFLDTCCK AADKDTCFST EGPNLVTRAK DALAGGGGSG GGGSGGGGSA |
| | | RNGDHSPLGP GRSCRLHTVR ASLEDLGWAD WVLSPREVQV TMCIGACPSQ |
| | | FRAANMHAQI KTSLHRLKPD TVPAPCCVPA SYNPMVLIQK TDTGVSLQTY |
| | | DDLLAKDCHC I |
| MSA- | 13 | EAHKSEIAHR YNALGEQHFK GLVLIAFSQY LQKASYDEHA KLVQEVTDFA |
| GDF15(197- | | KTCVADESAA NCDKSLHTLF GDKLCAIPNL RENYGELADC CTKQEPERNE |
| 308)(C273S) | | CFLQHKDDNP SLPPFERPEA EAMCTSFKEN PTTFMGHYLH EVARRHPYFY |
| | | APELLYYAEQ YNEILTQCCA EADKESCLTP KLDGVKEKAL VSSVRQRMKC |
| | | SSMQKFGERA FKAWAVARLS QTFPNADFAE ITKLATDLTK VNKECCHGDL |
| | | LECADDRAEL AKYMCENQAT ISSKLQTCCD KPLLKKAHCL SEVEHDTMPA |
| | | DLPAIAADFV EDQEVCKNYA EAKDVFLGTF LYEYSRRHPD YSVSLLLRLA |
| | | KKYEATLEKC CAEANPPACY GTVLAEFQPL VEEPKNLVKT NCDLYEKLGE |
| | | YGFQNAILVR YTQKAPQVST PTLVEAARNL GRVGTKCCTL PEDQRLPCVE |
| | | DYLSAILNRV CLLHEKTPVS EHVTKCCSGS LVERRPCFSA LTVDETYVPK |
| | | EFKAETFTFH SDICTLPEKE KQIKKQTALA ELVKHKPKAT AEQLKTVMDD |
| | | FAQFLDTCCK AADKDTCFST EGPNLVTRAK DALAGGGGSG GGGSGGGGSA |
| | | RNGDHCPLGP GRCCRLHTVR ASLEDLGWAD WVLSPREVQV TMCIGACPSQ |
| | | FRAANMHAQI KTSLHRLKPD TVPAPSCVPA SYNPMVLIQK TDTGVSLQTY |
| | | DDLLAKDCHC I |
| HSA-(G4S)3- | 14 | DAHKSEVAHR FKDLGEENFK ALVLIAFAQY LQQCPFEDHV KLVNEVTEFA |
| GDF15(197- | | KTCVADESAE NCDKSLHTLF GDKLCTVATL RETYGEMADC CAKQEPERNE |
| 308) | | CFLQHKDDNP NLPRLVRPEV DVMCTAFHDN EETFLKKYLY EIARRHPYFY |
| | | APELLFFAKR YKAAFTECCQ AADKAACLLP KLDELRDEGK ASSAKQRLKC |
| | | ASLQKFGERA FKAWAVARLS QRFPKAEFAE VSKLVTDLTK VHTECCHGDL |
| | | LECADDRADL AKYICENQDS ISSKLKECCE KPLLEKSHCI AEVENDEMPA |
| | | DLPSLAADFV ESKDVCKNYA EAKDVFLGMF LYEYARRHPD YSVVLLLRLA |
| | | KTYETTLEKC CAAADPHECY AKVFDEFKPL VEEPQNLIKQ NCELFEQLGE |
| | | YKFQNALLVR YTKKVPQVST PTLVEVSRNL GKVGSKCCKH PEAKRMPCAE |
| | | DYLSVVLNQL CVLHEKTPVS DRVTKCCTES LVNRRPCFSA LEVDETYVPK |
| | | EFNAETFTFH ADICTLSEKE RQIKKQTALV ELVKHKPKAT KEQLKAVMDD |
| | | FAAFVEKCCK ADDKETCFAE EGKKLVAASQ AALGLGGGGS GGGGSGGGGS |
| | | ARNGDHCPLG PGRCCRLHTV RASLEDLGWA DWVLSPREVQ VTMCIGACPS |
| | | QFRAANMHAQ IKTSLHRLKP DTVPAPCCVP ASYNPMVLIQ KTDTGVSLQT |
| | | YDDLLAKDCH CI |
| HSA-GGGS- | 15 | DAHKSEVAHR FKDLGEENFK ALVLIAFAQY LQQCPFEDHV KLVNEVTEFA |
| GDF15(197- | | KTCVADESAE NCDKSLHTLF GDKLCTVATL RETYGEMADC CAKQEPERNE |
| 308) | | CFLQHKDDNP NLPRLVRPEV DVMCTAFHDN EETFLKKYLY EIARRHPYFY |
| | | APELLFFAKR YKAAFTECCQ AADKAACLLP KLDELRDEGK ASSAKQRLKC |
| | | ASLQKFGERA FKAWAVARLS QRFPKAEFAE VSKLVTDLTK VHTECCHGDL |
| | | LECADDRADL AKYICENQDS ISSKLKECCE KPLLEKSHCI AEVENDEMPA |
| | | DLPSLAADFV ESKDVCKNYA EAKDVFLGMF LYEYARRHPD YSVVLLLRLA |
| | | KTYETTLEKC CAAADPHECY AKVFDEFKPL VEEPQNLIKQ NCELFEQLGE |
| | | YKFQNALLVR YTKKVPQVST PTLVEVSRNL GKVGSKCCKH PEAKRMPCAE |
| | | DYLSVVLNQL CVLHEKTPVS DRVTKCCTES LVNRRPCFSA LEVDETYVPK |
| | | EFNAETFTFH ADICTLSEKE RQIKKQTALV ELVKHKPKAT KEQLKAVMDD |
| | | FAAFVEKCCK ADDKETCFAE EGKKLVAASQ AALGLGGGGS ARNGDHCPLG |
| | | PGRCCRLHTV RASLEDLGWA DWVLSPREVQ VTMCIGACPS QFRAANMHAQ |
| | | IKTSLHRLKP DTVPAPCCVP ASYNPMVLIQ KTDTGVSLQT YDDLLAKDCH CI |
| HSA-GPPGS- | 16 | DAHKSEVAHR FKDLGEENFK ALVLIAFAQY LQQCPFEDHV KLVNEVTEFA |
| GDF15(197- | | KTCVADESAE NCDKSLHTLF GDKLCTVATL RETYGEMADC CAKQEPERNE |
| 308) | | CFLQHKDDNP NLPRLVRPEV DVMCTAFHDN EETFLKKYLY EIARRHPYFY |
| | | APELLFFAKR YKAAFTECCQ AADKAACLLP KLDELRDEGK ASSAKQRLKC |
| | | ASLQKFGERA FKAWAVARLS QRFPKAEFAE VSKLVTDLTK VHTECCHGDL |
| | | LECADDRADL AKYICENQDS ISSKLKECCE KPLLEKSHCI AEVENDEMPA |
| | | DLPSLAADFV ESKDVCKNYA EAKDVFLGMF LYEYARRHPD YSVVLLLRLA |
| | | KTYETTLEKC CAAADPHECY AKVFDEFKPL VEEPQNLIKQ NCELFEQLGE |
| | | YKFQNALLVR YTKKVPQVST PTLVEVSRNL GKVGSKCCKH PEAKRMPCAE |
| | | DYLSVVLNQL CVLHEKTPVS DRVTKCCTES LVNRRPCFSA LEVDETYVPK |
| | | EFNAETFTFH ADICTLSEKE RQIKKQTALV ELVKHKPKAT KEQLKAVMDD |
| | | FAAFVEKCCK ADDKETCFAE EGKKLVAASQ AALGLGPPGS ARNGDHCPLG |
| | | PGRCCRLHTV RASLEDLGWA DWVLSPREVQ VTMCIGACPS QFRAANMHAQ |
| | | IKTSLHRLKP DTVPAPCCVP ASYNPMVLIQ KTDTGVSLQT YDDLLAKDCH CI |
| HSA- | 17 | DAHKSEVAHR FKDLGEENFK ALVLIAFAQY LQQCPFEDHV KLVNEVTEFA |
| GDF15(197- | | KTCVADESAE NCDKSLHTLF GDKLCTVATL RETYGEMADC CAKQEPERNE |
| 308) | | CFLQHKDDNP NLPRLVRPEV DVMCTAFHDN EETFLKKYLY EIARRHPYFY |
| | | APELLFFAKR YKAAFTECCQ AADKAACLLP KLDELRDEGK ASSAKQRLKC |
| | | ASLQKFGERA FKAWAVARLS QRFPKAEFAE VSKLVTDLTK VHTECCHGDL |
| | | LECADDRADL AKYICENQDS ISSKLKECCE KPLLEKSHCI AEVENDEMPA |
| | | DLPSLAADFV ESKDVCKNYA EAKDVFLGMF LYEYARRHPD YSVVLLLRLA |
| | | KTYETTLEKC CAAADPHECY AKVFDEFKPL VEEPQNLIKQ NCELFEQLGE |
| | | YKFQNALLVR YTKKVPQVST PTLVEVSRNL GKVGSKCCKH PEAKRMPCAE |
| | | DYLSVVLNQL CVLHEKTPVS DRVTKCCTES LVNRRPCFSA LEVDETYVPK |
| | | EFNAETFTFH ADICTLSEKE RQIKKQTALV ELVKHKPKAT KEQLKAVMDD |
| | | FAAFVEKCCK ADDKETCFAE EGKKLVAASQ AALGLARNGD HCPLGPGRCC |
| | | RLHTVRASLE DLGWADWVLS PREVQVTMCI GACPSQFRAA NMHAQIKTSL |
| | | HRLKPDTVPA PCCVPASYNP MVLIQKTDTG VSLQTYDDLL AKDCHCI |
| MSA(Domain1)- | 18 | EAHKSEIAHR YNDLGEQHFK GLVLIAFSQY LQKCSYDEHA KLVQEVTDFA |
| (G4S)3- | | KTCVADESAA NCDKSLHTLF GDKLCAIPNL RENYGELADC CTKQEPERNE |
| GDF15(197- | | CFLQHKDDNP SLPPFERPEA EAMCTSFKEN PTTFMGHYLH EVARRHPYFY |
| 308) | | APELLYYAEQ YNEILTQCCA EADKESCLTP KLDGVKEKAL VSSVRQRGGG |
| | | GSGGGGSGGG GSARNGDHCP LGPGRCCRLH TVRASLEDLG WADWVLSPRE |
| | | VQVTMCIGAC PSQFRAANMH AQIKTSLHRL KPDTVPAPCC VPASYNPMVL |
| | | IQKTDTGVSL QTYDDLLAKD CHCI |
| Fc-(G4S)3- | 19 | DKTHTCPPCP APELLGGPSV FLFPPKPKDT LMISRTPEVT CVVVDVSHED |
| GDF15(197- | | PEVKFNWYVD GVEVHNAKTK PREEQYNSTY RVVSVLTVLH QDWLNGKEYK |
| 308) | | CKVSNKALPA PIEKTISKAK GQPREPQVYT LPPSRDELTK NQVSLTCLVK |
| | | GFYPSDIAVE WESNGQPENN YKTTPPVLDS DGSFFLYSKL TVDKSRWQQG |
| | | NVFSCSVMHE ALHNHYTQKS LSLSPGKGGG GSGGGGSGGG GSARNGDHCP |
| | | LGPGRCCRLH TVRASLEDLG WADWVLSPRE VQVTMCIGAC PSQFRAANMH |
| | | AQIKTSLHRL KPDTVPAPCC VPASYNPMVL IQKTDTGVSL QTYDDLLAKD CHCI |
| HSA- | 20 | DAHKSEVAHR FKDLGEENFK ALVLIAFAQY LQQCPFEDHV KLVNEVTEFA |
| GDF15(197- | | KTCVADESAE NCDKSLHTLF GDKLCTVATL RETYGEMADC CAKQEPERNE |
| 308)(R198H) | | CFLQHKDDNP NLPRLVRPEV DVMCTAFHDN EETFLKKYLY EIARRHPYFY |
| | | APELLFFAKR YKAAFTECCQ AADKAACLLP KLDELRDEGK ASSAKQRLKC |
| | | ASLQKFGERA FKAWAVARLS QRFPKAEFAE VSKLVTDLTK VHTECCHGDL |
| | | LECADDRADL AKYICENQDS ISSKLKECCE KPLLEKSHCI AEVENDEMPA |
| | | DLPSLAADFV ESKDVCKNYA EAKDVFLGMF LYEYARRHPD YSVVLLLRLA |
| | | KTYETTLEKC CAAADPHECY AKVFDEFKPL VEEPQNLIKQ NCELFEQLGE |
| | | YKFQNALLVR YTKKVPQVST PTLVEVSRNL GKVGSKCCKH PEAKRMPCAE |
| | | DYLSVVLNQL CVLHEKTPVS DRVTKCCTES LVNRRPCFSA LEVDETYVPK |
| | | EFNAETFTFH ADICTLSEKE RQIKKQTALV ELVKHKPKAT KEQLKAVMDD |
| | | FAAFVEKCCK ADDKETCFAE EGKKLVAASQ AALGLGGGGS GGGGSGGGGS |
| | | AHNGDHCPLG PGRCCRLHTV RASLEDLGWA DWVLSPREVQ VTMCIGACPS |
| | | QFRAANMHAQ IKTSLHRLKP DTVPAPCCVP ASYNPMVLIQ KTDTGVSLQT |
| | | YDDLLAKDCH CI |
| HSA- | 21 | DAHKSEVAHR FKDLGEENFK ALVLIAFAQY LQQCPFEDHV KLVNEVTEFA |
| GDF15(197- | | KTCVADESAE NCDKSLHTLF GDKLCTVATL RETYGEMADC CAKQEPERNE |
| 308)(R198H) | | CFLQHKDDNP NLPRLVRPEV DVMCTAFHDN EETFLKKYLY EIARRHPYFY |
| (N199A) | | APELLFFAKR YKAAFTECCQ AADKAACLLP KLDELRDEGK ASSAKQRLKC |
| | | ASLQKFGERA FKAWAVARLS QRFPKAEFAE VSKLVTDLTK VHTECCHGDL |
| | | LECADDRADL AKYICENQDS ISSKLKECCE KPLLEKSHCI AEVENDEMPA |
| | | DLPSLAADFV ESKDVCKNYA EAKDVFLGMF LYEYARRHPD YSVVLLLRLA |
| | | KTYETTLEKC CAAADPHECY AKVFDEFKPL VEEPQNLIKQ NCELFEQLGE |
| | | YKFQNALLVR YTKKVPQVST PTLVEVSRNL GKVGSKCCKH PEAKRMPCAE |
| | | DYLSVVLNQL CVLHEKTPVS DRVTKCCTES LVNRRPCFSA LEVDETYVPK |
| | | EFNAETFTFH ADICTLSEKE RQIKKQTALV ELVKHKPKAT KEQLKAVMDD |
| | | FAAFVEKCCK ADDKETCFAE EGKKLVAASQ AALGLGGGGS GGGGSGGGGS |
| | | AHAGDHCPLG PGRCCRLHTV RASLEDLGWA DWVLSPREVQ VTMCIGACPS |
| | | QFRAANMHAQ IKTSLHRLKP DTVPAPCCVP ASYNPMVLIQ KTDTGVSLQT |
| | | YDDLLAKDCH CI |
| HSA- | 22 | DAHKSEVAHR FKDLGEENFK ALVLIAFAQY LQQCPFEDHV KLVNEVTEFA |
| GDF15(197- | | KTCVADESAE NCDKSLHTLF GDKLCTVATL RETYGEMADC CAKQEPERNE |
| 308)(N199E) | | CFLQHKDDNP NLPRLVRPEV DVMCTAFHDN EETFLKKYLY EIARRHPYFY |
| | | APELLFFAKR YKAAFTECCQ AADKAACLLP KLDELRDEGK ASSAKQRLKC |
| | | ASLQKFGERA FKAWAVARLS QRFPKAEFAE VSKLVTDLTK VHTECCHGDL |
| | | LECADDRADL AKYICENQDS ISSKLKECCE KPLLEKSHCI AEVENDEMPA |
| | | DLPSLAADFV ESKDVCKNYA EAKDVFLGMF LYEYARRHPD YSVVLLLRLA |
| | | KTYETTLEKC CAAADPHECY AKVFDEFKPL VEEPQNLIKQ NCELFEQLGE |
| | | YKFQNALLVR YTKKVPQVST PTLVEVSRNL GKVGSKCCKH PEAKRMPCAE |
| | | DYLSVVLNQL CVLHEKTPVS DRVTKCCTES LVNRRPCFSA LEVDETYVPK |
| | | EFNAETFTFH ADICTLSEKE RQIKKQTALV ELVKHKPKAT KEQLKAVMDD |
| | | FAAFVEKCCK ADDKETCFAE EGKKLVAASQ AALGLGGGGS GGGGSGGGGS |
| | | AREGDHCPLG PGRCCRLHTV RASLEDLGWA DWVLSPREVQ VTMCIGACPS |
| | | QFRAANMHAQ IKTSLHRLKP DTVPAPCCVP ASYNPMVLIQ KTDTGVSLQT |
| | | YDDLLAKDCH CI |
| MSA-GDF15- | 23 | EAHKSEIAHRYNALGEQHFKGLVLIAFSQYLQKASYDEHAKLVQEVTDFAKTCVADESAAN |
| (G4S)3- | | CDKSLHTLFGDKLCAIPNLRENYGELADCCTKQEPERNECFLQHKDDNPSLPPFERPEAEA |
| GDF15(197- | | MCTSFKENPTTFMGHYLHEVARRHPYFYAPELLYYAEQYNEILTQCCAEADKESCLTPKLD |
| 308)(Q247R) | | GVKEKALVSSVRQRMKCSSMQKFGERAFKAWAVARLSQTFPNADFAEITKLATDLTKVNKE |
| | | CCHGDLLECADDRAELAKYMCENQATISSKLQTCCDKPLLKKAHCLSEVEHDTMPADLPAI |
| | | AADFVEDQEVCKNYAEAKDVFLGTFLYEYSRRHPDYSVSLLLRLAKKYEATLEKCCAEANP |
| | | PACYGTVLAEFQPLVEEPKNLVKTNCDLYEKLGEYGFQNAILVRYTQKAPQVSTPTLVEAA |
| | | RNLGRVGTKCCTLPEDQRLPCVEDYLSAILNRVCLLHEKTPVSEHVTKCCSGSLVERRPCF |
| | | SALTVDETYVPKEFKAETFTFHSDICTLPEKEKQIKKQTALAELVKHKPKATAEQLKTVMD |
| | | DFAQFLDTCCKAADKDTCFSTEGPNLVTRAKDALAGGGGSGGGGSGGGGSARNGDHCPLGP |
| | | GRCCRLHTVRASLEDLGWADWVLSPREVQVTMCIGACPSRFRAANMHAQIKTSLHRLKPDT |
| | | VPAPCCVPASYNPMVLIQKTDTGVSLQTYDDLLAKDCHCI |
| MSA-GDF15- | 24 | EAHKSEIAHRYNALGEQHFKGLVLIAFSQYLQKASYDEHAKLVQEVTDFAKTCVADESAAN |
| (G4S)3- | | CDKSLHTLFGDKLCAIPNLRENYGELADCCTKQEPERNECFLQHKDDNPSLPPFERPEAEA |
| GDF15(197- | | MCTSFKENPTTFMGHYLHEVARRHPYFYAPELLYYAEQYNEILTQCCAEADKESCLTPKLD |
| 308)(S278R) | | GVKEKALVSSVRQRMKCSSMQKFGERAFKAWAVARLSQTFPNADFAEITKLATDLTKVNKE |
| | | CCHGDLLECADDRAELAKYMCENQATISSKLQTCCDKPLLKKAHCLSEVEHDTMPADLPAI |
| | | AADFVEDQEVCKNYAEAKDVFLGTFLYEYSRRHPDYSVSLLLRLAKKYEATLEKCCAEANP |
| | | PACYGTVLAEFQPLVEEPKNLVKTNCDLYEKLGEYGFQNAILVRYTQKAPQVSTPTLVEAA |
| | | RNLGRVGTKCCTLPEDQRLPCVEDYLSAILNRVCLLHEKTPVSEHVTKCCSGSLVERRPCF |
| | | SALTVDETYVPKEFKAETFTFHSDICTLPEKEKQIKKQTALAELVKHKPKATAEQLKTVMD |
| | | DFAQFLDTCCKAADKDTCFSTEGPNLVTRAKDALAGGGGSGGGGSGGGGSARNGDHCPLGP |
| | | GRCCRLHTVRASLEDLGWADWVLSPREVQVTMCIGACPSQFRAANMHAQIKTSLHRLKPDT |
| | | VPAPCCVPARYNPMVLIQKTDTGVSLQTYDDLLAKDCHCI |
| MSA-GDF15- | 25 | EAHKSEIAHRYNALGEQHFKGLVLIAFSQYLQKASYDEHAKLVQEVTDFAKTCVADESAAN |
| (G4S)3- | | CDKSLHTLFGDKLCAIPNLRENYGELADCCTKQEPERNECFLQHKDDNPSLPPFERPEAEA |
| GDF15(197- | | MCTSFKENPTTFMGHYLHEVARRHPYFYAPELLYYAEQYNEILTQCCAEADKESCLTPKLD |
| 308)(D289R) | | GVKEKALVSSVRQRMKCSSMQKFGERAFKAWAVARLSQTFPNADFAEITKLATDLTKVNKE |
| | | CCHGDLLECADDRAELAKYMCENQATISSKLQTCCDKPLLKKAHCLSEVEHDTMPADLPAI |
| | | AADFVEDQEVCKNYAEAKDVFLGTFLYEYSRRHPDYSVSLLLRLAKKYEATLEKCCAEANP |
| | | PACYGTVLAEFQPLVEEPKNLVKTNCDLYEKLGEYGFQNAILVRYTQKAPQVSTPTLVEAA |
| | | RNLGRVGTKCCTLPEDQRLPCVEDYLSAILNRVCLLHEKTPVSEHVTKCCSGSLVERRPCF |
| | | SALTVDETYVPKEFKAETFTFHSDICTLPEKEKQIKKQTALAELVKHKPKATAEQLKTVMD |
| | | DFAQFLDTCCKAADKDTCFSTEGPNLVTRAKDALAGGGGSGGGGSGGGGSARNGDHCPLGP |
| | | GRCCRLHTVRASLEDLGWADWVLSPREVQVTMCIGACPSQFRAANMHAQIKTSLHRLKPDT |
| | | VPAPCCVPASYNPMVLIQKTRTGVSLQTYDDLLAKDCHCI |
| MSA-GDF15- | 26 | EAHKSEIAHRYNALGEQHFKGLVLIAFSQYLQKASYDEHAKLVQEVTDFAKTCVADESAAN |
| (G4S)3- | | CDKSLHTLFGDKLCAIPNLRENYGELADCCTKQEPERNECFLQHKDDNPSLPPFERPEAEA |
| GDF15(197- | | MCTSFKENPTTFMGHYLHEVARRHPYFYAPELLYYAEQYNEILTQCCAEADKESCLTPKLD |
| 308)(L294R) | | GVKEKALVSSVRQRMKCSSMQKFGERAFKAWAVARLSQTFPNADFAEITKLATDLTKVNKE |
| | | CCHGDLLECADDRAELAKYMCENQATISSKLQTCCDKPLLKKAHCLSEVEHDTMPADLPAI |
| | | AADFVEDQEVCKNYAEAKDVFLGTFLYEYSRRHPDYSVSLLLRLAKKYEATLEKCCAEANP |
| | | PACYGTVLAEFQPLVEEPKNLVKTNCDLYEKLGEYGFQNAILVRYTQKAPQVSTPTLVEAA |
| | | RNLGRVGTKCCTLPEDQRLPCVEDYLSAILNRVCLLHEKTPVSEHVTKCCSGSLVERRPCF |
| | | SALTVDETYVPKEFKAETFTFHSDICTLPEKEKQIKKQTALAELVKHKPKATAEQLKTVMD |
| | | DFAQFLDTCCKAADKDTCFSTEGPNLVTRAKDALAGGGGSGGGGSGGGGSARNGDHCPLGP |
| | | GRCCRLHTVRASLEDLGWADWVLSPREVQVTMCIGACPSQFRAANMHAQIKTSLHRLKPDT |
| | | VPAPCCVPASYNPMVLIQKTDTGVSRQTYDDLLAKDCHCI |
| MSA-GDF15- | 27 | EAHKSEIAHRYNALGEQHFKGLVLIAFSQYLQKASYDEHAKLVQEVTDFAKTCVADESAAN |
| (G4S)3- | | CDKSLHTLFGDKLCAIPNLRENYGELADCCTKQEPERNECFLQHKDDNPSLPPFERPEAEA |
| (T215R) | | MCTSFKENPTTFMGHYLHEVARRHPYFYAPELLYYAEQYNEILTQCCAEADKESCLTPKLD |
| | | GVKEKALVSSVRQRMKCSSMQKFGERAFKAWAVARLSQTFPNADFAEITKLATDLTKVNKE |
| | | CCHGDLLECADDRAELAKYMCENQATISSKLQTCCDKPLLKKAHCLSEVEHDTMPADLPAI |
| | | AADFVEDQEVCKNYAEAKDVFLGTFLYEYSRRHPDYSVSLLLRLAKKYEATLEKCCAEANP |
| | | PACYGTVLAEFQPLVEEPKNLVKTNCDLYEKLGEYGFQNAILVRYTQKAPQVSTPTLVEAA |
| | | RNLGRVGTKCCTLPEDQRLPCVEDYLSAILNRVCLLHEKTPVSEHVTKCCSGSLVERRPCF |
| | | SALTVDETYVPKEFKAETFTFHSDICTLPEKEKQIKKQTALAELVKHKPKATAEQLKTVMD |
| | | DFAQFLDTCCKAADKDTCFSTEGPNLVTRAKDALAGGGGSGGGGSGGGGSARNGDHCPLGP |
| | | GRCCRLHRVRASLEDLGWADWVLSPREVQVTMCIGACPSQFRAANMHAQIKTSLHRLKPDT |
| | | VPAPCCVPASYNPMVLIQKTDTGVSLQTYDDLLAKDCHCI |
| MSA-GDF15- | 28 | EAHKSEIAHRYNALGEQHFKGLVLIAFSQYLQKASYDEHAKLVQEVTDFAKTCVADESAAN |
| (G4S)3- | | CDKSLHTLFGDKLCAIPNLRENYGELADCCTKQEPERNECFLQHKDDNPSLPPFERPEAEA |
| GDF15(E221R) | | MCTSFKENPTTFMGHYLHEVARRHPYFYAPELLYYAEQYNEILTQCCAEADKESCLTPKLD |
| | | GVKEKALVSSVRQRMKCSSMQKFGERAFKAWAVARLSQTFPNADFAEITKLATDLTKVNKE |
| | | CCHGDLLECADDRAELAKYMCENQATISSKLQTCCDKPLLKKAHCLSEVEHDTMPADLPAI |
| | | AADFVEDQEVCKNYAEAKDVFLGTFLYEYSRRHPDYSVSLLLRLAKKYEATLEKCCAEANP |
| | | PACYGTVLAEFQPLVEEPKNLVKTNCDLYEKLGEYGFQNAILVRYTQKAPQVSTPTLVEAA |
| | | RNLGRVGTKCCTLPEDQRLPCVEDYLSAILNRVCLLHEKTPVSEHVTKCCSGSLVERRPCF |
| | | SALTVDETYVPKEFKAETFTFHSDICTLPEKEKQIKKQTALAELVKHKPKATAEQLKTVMD |
| | | DFAQFLDTCCKAADKDTCFSTEGPNLVTRAKDALAGGGGSGGGGSGGGGSARNGDHCPLGP |
| | | GRCCRLHTVRASLRDLGWADWVLSPREVQVTMCIGACPSQFRAANMHAQIKTSLHRLKPDT |
| | | VPAPCCVPASYNPMVLIQKTDTGVSLQTYDDLLAKDCHCI |
| MSA-GDF15- | 29 | EAHKSEIAHRYNALGEQHFKGLVLIAFSQYLQKASYDEHAKLVQEVTDFAKTCVADESAAN |
| (G4S)3- | | CDKSLHTLFGDKLCAIPNLRENYGELADCCTKQEPERNECFLQHKDDNPSLPPFERPEAEA |
| GDF15(W228A) | | MCTSFKENPTTFMGHYLHEVARRHPYFYAPELLYYAEQYNEILTQCCAEADKESCLTPKLD |
| | | GVKEKALVSSVRQRMKCSSMQKFGERAFKAWAVARLSQTFPNADFAEITKLATDLTKVNKE |
| | | CCHGDLLECADDRAELAKYMCENQATISSKLQTCCDKPLLKKAHCLSEVEHDTMPADLPAI |
| | | AADFVEDQEVCKNYAEAKDVFLGTFLYEYSRRHPDYSVSLLLRLAKKYEATLEKCCAEANP |
| | | PACYGTVLAEFQPLVEEPKNLVKTNCDLYEKLGEYGFQNAILVRYTQKAPQVSTPTLVEAA |
| | | RNLGRVGTKCCTLPEDQRLPCVEDYLSAILNRVCLLHEKTPVSEHVTKCCSGSLVERRPCF |
| | | SALTVDETYVPKEFKAETFTFHSDICTLPEKEKQIKKQTALAELVKHKPKATAEQLKTVMD |
| | | DFAQFLDTCCKAADKDTCFSTEGPNLVTRAKDALAGGGGSGGGGSGGGGSARNGDHCPLGP |
| | | GRCCRLHTVRASLEDLGWADRVLSPREVQVTMCIGACPSQFRAANMHAQIKTSLHRLKPDT |
| | | VPAPCCVPASYNPMVLIQKTDTGVSLQTYDDLLAKDCHCI |
| MSA-GDF15- | 30 | EAHKSEIAHRYNALGEQHFKGLVLIAFSQYLQKASYDEHAKLVQEVTDFAKTCVADESAAN |
| (G4S)3- | | CDKSLHTLFGDKLCAIPNLRENYGELADCCTKQEPERNECFLQHKDDNPSLPPFERPEAEA |
| GDF15(S231R) | | MCTSFKENPTTFMGHYLHEVARRHPYFYAPELLYYAEQYNEILTQCCAEADKESCLTPKLD |
| | | GVKEKALVSSVRQRMKCSSMQKFGERAFKAWAVARLSQTFPNADFAEITKLATDLTKVNKE |
| | | CCHGDLLECADDRAELAKYMCENQATISSKLQTCCDKPLLKKAHCLSEVEHDTMPADLPAI |
| | | AADFVEDQEVCKNYAEAKDVFLGTFLYEYSRRHPDYSVSLLLRLAKKYEATLEKCCAEANP |
| | | PACYGTVLAEFQPLVEEPKNLVKTNCDLYEKLGEYGFQNAILVRYTQKAPQVSTPTLVEAA |
| | | RNLGRVGTKCCTLPEDQRLPCVEDYLSAILNRVCLLHEKTPVSEHVTKCCSGSLVERRPCF |
| | | SALTVDETYVPKEFKAETFTFHSDICTLPEKEKQIKKQTALAELVKHKPKATAEQLKTVMD |
| | | DFAQFLDTCCKAADKDTCFSTEGPNLVTRAKDALAGGGGSGGGGSGGGGSARNGDHCPLGP |
| | | GRCCRLHTVRASLEDLGWADWVLRPREVQVTMCIGACPSQFRAANMHAQIKTSLHRLKPDT |
| | | VPAPCCVPASYNPMVLIQKTDTGVSLQTYDDLLAKDCHCI |
| MSA-GDF15- | 31 | EAHKSEIAHRYNALGEQHFKGLVLIAFSQYLQKASYDEHAKLVQEVTDFAKTCVADESAAN |
| (G4S)3- | | CDKSLHTLFGDKLCAIPNLRENYGELADCCTKQEPERNECFLQHKDDNPSLPPFERPEAEA |
| GDF15(Q236R) | | MCTSFKENPTTFMGHYLHEVARRHPYFYAPELLYYAEQYNEILTQCCAEADKESCLTPKLD |
| | | GVKEKALVSSVRQRMKCSSMQKFGERAFKAWAVARLSQTFPNADFAEITKLATDLTKVNKE |
| | | CCHGDLLECADDRAELAKYMCENQATISSKLQTCCDKPLLKKAHCLSEVEHDTMPADLPAI |
| | | AADFVEDQEVCKNYAEAKDVFLGTFLYEYSRRHPDYSVSLLLRLAKKYEATLEKCCAEANP |
| | | PACYGTVLAEFQPLVEEPKNLVKTNCDLYEKLGEYGFQNAILVRYTQKAPQVSTPTLVEAA |
| | | RNLGRVGTKCCTLPEDQRLPCVEDYLSAILNRVCLLHEKTPVSEHVTKCCSGSLVERRPCF |
| | | SALTVDETYVPKEFKAETFTFHSDICTLPEKEKQIKKQTALAELVKHKPKATAEQLKTVMD |
| | | DFAQFLDTCCKAADKDTCFSTEGPNLVTRAKDALAGGGGSGGGGSGGGGSARNGDHCPLGP |
| | | GRCCRLHTVRASLEDLGWADWVLSPREVRVTMCIGACPSQFRAANMHAQIKTSLHRLKPDT |
| | | VPAPCCVPASYNPMVLIQKTDTGVSLQTYDDLLAKDCHCI |
| MSA-GDF15- | 32 | EAHKSEIAHRYNALGEQHFKGLVLIAFSQYLQKASYDEHAKLVQEVTDFAKTCVADESAAN |
| (G4S)3- | | CDKSLHTLFGDKLCAIPNLRENYGELADCCTKQEPERNECFLQHKDDNPSLPPFERPEAEA |
| GDF15(M253R) | | MCTSFKENPTTFMGHYLHEVARRHPYFYAPELLYYAEQYNEILTQCCAEADKESCLTPKLD |
| | | GVKEKALVSSVRQRMKCSSMQKFGERAFKAWAVARLSQTFPNADFAEITKLATDLTKVNKE |
| | | CCHGDLLECADDRAELAKYMCENQATISSKLQTCCDKPLLKKAHCLSEVEHDTMPADLPAI |
| | | AADFVEDQEVCKNYAEAKDVFLGTFLYEYSRRHPDYSVSLLLRLAKKYEATLEKCCAEANP |
| | | PACYGTVLAEFQPLVEEPKNLVKTNCDLYEKLGEYGFQNAILVRYTQKAPQVSTPTLVEAA |
| | | RNLGRVGTKCCTLPEDQRLPCVEDYLSAILNRVCLLHEKTPVSEHVTKCCSGSLVERRPCF |
| | | SALTVDETYVPKEFKAETFTFHSDICTLPEKEKQIKKQTALAELVKHKPKATAEQLKTVMD |
| | | DFAQFLDTCCKAADKDTCFSTEGPNLVTRAKDALAGGGGSGGGGSGGGGSARNGDHCPLGP |
| | | GRCCRLHTVRASLEDLGWADWVLSPREVQVTMCIGACPSQFRAANRHAQIKTSLHRLKPDT |
| | | VPAPCCVPASYNPMVLIQKTDTGVSLQTYDDLLAKDCHCI |
| MSA-GDF15- | 33 | EAHKSEIAHRYNALGEQHFKGLVLIAFSQYLQKASYDEHAKLVQEVTDFAKTCVADESAAN |
| (G4S)3- | | CDKSLHTLFGDKLCAIPNLRENYGELADCCTKQEPERNECFLQHKDDNPSLPPFERPEAEA |
| GDF15(I285R) | | MCTSFKENPTTFMGHYLHEVARRHPYFYAPELLYYAEQYNEILTQCCAEADKESCLTPKLD |
| | | GVKEKALVSSVRQRMKCSSMQKFGERAFKAWAVARLSQTFPNADFAEITKLATDLTKVNKE |
| | | CCHGDLLECADDRAELAKYMCENQATISSKLQTCCDKPLLKKAHCLSEVEHDTMPADLPAI |
| | | AADFVEDQEVCKNYAEAKDVFLGTFLYEYSRRHPDYSVSLLLRLAKKYEATLEKCCAEANP |
| | | PACYGTVLAEFQPLVEEPKNLVKTNCDLYEKLGEYGFQNAILVRYTQKAPQVSTPTLVEAA |
| | | RNLGRVGTKCCTLPEDQRLPCVEDYLSAILNRVCLLHEKTPVSEHVTKCCSGSLVERRPCF |
| | | SALTVDETYVPKEFKAETFTFHSDICTLPEKEKQIKKQTALAELVKHKPKATAEQLKTVMD |
| | | DFAQFLDTCCKAADKDTCFSTEGPNLVTRAKDALAGGGGSGGGGSGGGGSARNGDHCPLGP |
| | | GRCCRLHTVRASLEDLGWADWVLSPREVQVTMCIGACPSQFRAANMHAQIKTSLHRLKPDT |
| | | VPAPCCVPASYNPMVLRQKTDTGVSLQTYDDLLAKDCHCI |
| MSA-GDF15- | 34 | EAHKSEIAHRYNALGEQHFKGLVLIAFSQYLQKASYDEHAKLVQEVTDFAKTCVADESAAN |
| (G4S)3- | | CDKSLHTLFGDKLCAIPNLRENYGELADCCTKQEPERNECFLQHKDDNPSLPPFERPEAEA |
| GDF15(I285A) | | MCTSFKENPTTFMGHYLHEVARRHPYFYAPELLYYAEQYNEILTQCCAEADKESCLTPKLD |
| | | GVKEKALVSSVRQRMKCSSMQKFGERAFKAWAVARLSQTFPNADFAEITKLATDLTKVNKE |
| | | CCHGDLLECADDRAELAKYMCENQATISSKLQTCCDKPLLKKAHCLSEVEHDTMPADLPAI |
| | | AADFVEDQEVCKNYAEAKDVFLGTFLYEYSRRHPDYSVSLLLRLAKKYEATLEKCCAEANP |
| | | PACYGTVLAEFQPLVEEPKNLVKTNCDLYEKLGEYGFQNAILVRYTQKAPQVSTPTLVEAA |
| | | RNLGRVGTKCCTLPEDQRLPCVEDYLSAILNRVCLLHEKTPVSEHVTKCCSGSLVERRPCF |
| | | SALTVDETYVPKEFKAETFTFHSDICTLPEKEKQIKKQTALAELVKHKPKATAEQLKTVMD |
| | | DFAQFLDTCCKAADKDTCFSTEGPNLVTRAKDALAGGGGSGGGGSGGGGSARNGDHCPLGP |
| | | GRCCRLHTVRASLEDLGWADWVLSPREVQVTMCIGACPSQFRAANMHAQIKTSLHRLKPDT |
| | | VPAPCCVPASYNPMVLAQKTDTGVSLQTYDDLLAKDCHCI |
| MSA-GDF15- | 35 | EAHKSEIAHRYNALGEQHFKGLVLIAFSQYLQKASYDEHAKLVQEVTDFAKTCVADESAAN |
| (G4S)3- | | CDKSLHTLFGDKLCAIPNLRENYGELADCCTKQEPERNECFLQHKDDNPSLPPFERPEAEA |
| GDF15(Q286R) | | MCTSFKENPTTFMGHYLHEVARRHPYFYAPELLYYAEQYNEILTQCCAEADKESCLTPKLD |
| | | GVKEKALVSSVRQRMKCSSMQKFGERAFKAWAVARLSQTFPNADFAEITKLATDLTKVNKE |
| | | CCHGDLLECADDRAELAKYMCENQATISSKLQTCCDKPLLKKAHCLSEVEHDTMPADLPAI |
| | | AADFVEDQEVCKNYAEAKDVFLGTFLYEYSRRHPDYSVSLLLRLAKKYEATLEKCCAEANP |
| | | PACYGTVLAEFQPLVEEPKNLVKTNCDLYEKLGEYGFQNAILVRYTQKAPQVSTPTLVEAA |
| | | RNLGRVGTKCCTLPEDQRLPCVEDYLSAILNRVCLLHEKTPVSEHVTKCCSGSLVERRPCF |
| | | SALTVDETYVPKEFKAETFTFHSDICTLPEKEKQIKKQTALAELVKHKPKATAEQLKTVMD |
| | | DFAQFLDTCCKAADKDTCFSTEGPNLVTRAKDALAGGGGSGGGGSGGGGSARNGDHCPLGP |
| | | GRCCRLHTVRASLEDLGWADWVLSPREVQVTMCIGACPSQFRAANMHAQIKTSLHRLKPDT |
| | | VPAPCCVPASYNPMVLIRKTDTGVSLQTYDDLLAKDCHCI |
| MSA-GDF15- | 36 | EAHKSEIAHRYNALGEQHFKGLVLIAFSQYLQKASYDEHAKLVQEVTDFAKTCVADESAAN |
| (G4S)3- | | CDKSLHTLFGDKLCAIPNLRENYGELADCCTKQEPERNECFLQHKDDNPSLPPFERPEAEA |
| GDF15(V292R) | | MCTSFKENPTTFMGHYLHEVARRHPYFYAPELLYYAEQYNEILTQCCAEADKESCLTPKLD |
| | | GVKEKALVSSVRQRMKCSSMQKFGERAFKAWAVARLSQTFPNADFAEITKLATDLTKVNKE |
| | | CCHGDLLECADDRAELAKYMCENQATISSKLQTCCDKPLLKKAHCLSEVEHDTMPADLPAI |
| | | AADFVEDQEVCKNYAEAKDVFLGTFLYEYSRRHPDYSVSLLLRLAKKYEATLEKCCAEANP |
| | | PACYGTVLAEFQPLVEEPKNLVKTNCDLYEKLGEYGFQNAILVRYTQKAPQVSTPTLVEAA |
| | | RNLGRVGTKCCTLPEDQRLPCVEDYLSAILNRVCLLHEKTPVSEHVTKCCSGSLVERRPCF |
| | | SALTVDETYVPKEFKAETFTFHSDICTLPEKEKQIKKQTALAELVKHKPKATAEQLKTVMD |
| | | DFAQFLDTCCKAADKDTCFSTEGPNLVTRAKDALAGGGGSGGGGSGGGGSARNGDHCPLGP |
| | | GRCCRLHTVRASLEDLGWADWVLSPREVQVTMCIGACPSQFRAANMHAQIKTSLHRLKPDT |
| | | VPAPCCVPASYNPMVLIQKTDTGRSLQTYDDLLAKDCHCI |
| MSA-GDF15- | 37 | EAHKSEIAHRYNALGEQHFKGLVLIAFSQYLQKASYDEHAKLVQEVTDFAKTCVADESAAN |
| (G4S)3- | | CDKSLHTLFGDKLCAIPNLRENYGELADCCTKQEPERNECFLQHKDDNPSLPPFERPEAEA |
| GDF15(L294A) | | MCTSFKENPTTFMGHYLHEVARRHPYFYAPELLYYAEQYNEILTQCCAEADKESCLTPKLD |
| | | GVKEKALVSSVRQRMKCSSMQKFGERAFKAWAVARLSQTFPNADFAEITKLATDLTKVNKE |
| | | CCHGDLLECADDRAELAKYMCENQATISSKLQTCCDKPLLKKAHCLSEVEHDTMPADLPAI |
| | | AADFVEDQEVCKNYAEAKDVFLGTFLYEYSRRHPDYSVSLLLRLAKKYEATLEKCCAEANP |
| | | PACYGTVLAEFQPLVEEPKNLVKTNCDLYEKLGEYGFQNAILVRYTQKAPQVSTPTLVEAA |
| | | RNLGRVGTKCCTLPEDQRLPCVEDYLSAILNRVCLLHEKTPVSEHVTKCCSGSLVERRPCF |
| | | SALTVDETYVPKEFKAETFTFHSDICTLPEKEKQIKKQTALAELVKHKPKATAEQLKTVMD |
| | | DFAQFLDTCCKAADKDTCFSTEGPNLVTRAKDALAGGGGSGGGGSGGGGSARNGDHCPLGP |
| | | GRCCRLHTVRASLEDLGWADWVLSPREVQVTMCIGACPSQFRAANMHAQIKTSLHRLKPDT |
| | | VPAPCCVPASYNPMVLIQKTDTGVSAQTYDDLLAKDCHCI |
| MSA-GDF15- | 38 | EAHKSEIAHRYNALGEQHFKGLVLIAFSQYLQKASYDEHAKLVQEVTDFAKTCVADESAAN |
| (G4S)3- | | CDKSLHTLFGDKLCAIPNLRENYGELADCCTKQEPERNECFLQHKDDNPSLPPFERPEAEA |
| GDF15(I285A) | | MCTSFKENPTTFMGHYLHEVARRHPYFYAPELLYYAEQYNEILTQCCAEADKESCLTPKLD |
| (L294A) | | GVKEKALVSSVRQRMKCSSMQKFGERAFKAWAVARLSQTFPNADFAEITKLATDLTKVNKE |
| | | CCHGDLLECADDRAELAKYMCENQATISSKLQTCCDKPLLKKAHCLSEVEHDTMPADLPAI |
| | | AADFVEDQEVCKNYAEAKDVFLGTFLYEYSRRHPDYSVSLLLRLAKKYEATLEKCCAEANP |
| | | PACYGTVLAEFQPLVEEPKNLVKTNCDLYEKLGEYGFQNAILVRYTQKAPQVSTPTLVEAA |
| | | RNLGRVGTKCCTLPEDQRLPCVEDYLSAILNRVCLLHEKTPVSEHVTKCCSGSLVERRPCF |
| | | SALTVDETYVPKEFKAETFTFHSDICTLPEKEKQIKKQTALAELVKHKPKATAEQLKTVMD |
| | | DFAQFLDTCCKAADKDTCFSTEGPNLVTRAKDALAGGGGSGGGGSGGGGSARNGDHCPLGP |
| | | GRCCRLHTVRASLEDLGWADWVLSPREVQVTMCIGACPSQFRAANMHAQIKTSLHRLKPDT |
| | | VPAPCCVPASYNPMVLAQKTDTGVSAQTYDDLLAKDCHCI |
| MSA-GDF15- | 39 | EAHKSEIAHRYNALGEQHFKGLVLIAFSQYLQKASYDEHAKLVQEVTDFAKTCVADESAAN |
| (G4S)3- | | CDKSLHTLFGDKLCAIPNLRENYGELADCCTKQEPERNECFLQHKDDNPSLPPFERPEAEA |
| GDF15(Q295R) | | MCTSFKENPTTFMGHYLHEVARRHPYFYAPELLYYAEQYNEILTQCCAEADKESCLTPKLD |
| | | GVKEKALVSSVRQRMKCSSMQKFGERAFKAWAVARLSQTFPNADFAEITKLATDLTKVNKE |
| | | CCHGDLLECADDRAELAKYMCENQATISSKLQTCCDKPLLKKAHCLSEVEHDTMPADLPAI |
| | | AADFVEDQEVCKNYAEAKDVFLGTFLYEYSRRHPDYSVSLLLRLAKKYEATLEKCCAEANP |
| | | PACYGTVLAEFQPLVEEPKNLVKTNCDLYEKLGEYGFQNAILVRYTQKAPQVSTPTLVEAA |
| | | RNLGRVGTKCCTLPEDQRLPCVEDYLSAILNRVCLLHEKTPVSEHVTKCCSGSLVERRPCF |
| | | SALTVDETYVPKEFKAETFTFHSDICTLPEKEKQIKKQTALAELVKHKPKATAEQLKTVMD |
| | | DFAQFLDTCCKAADKDTCFSTEGPNLVTRAKDALAGGGGSGGGGSGGGGSARNGDHCPLGP |
| | | GRCCRLHTVRASLEDLGWADWVLSPREVQVTMCIGACPSQFRAANMHAQIKTSLHRLKPDT |
| | | VPAPCCVPASYNPMVLIQKTDTGVSLRTYDDLLAKDCHCI |
| MSA-GDF15- | 40 | EAHKSEIAHRYNALGEQHFKGLVLIAFSQYLQKASYDEHAKLVQEVTDFAKTCVADESAAN |
| (G4S)3- | | CDKSLHTLFGDKLCAIPNLRENYGELADCCTKQEPERNECFLQHKDDNPSLPPFERPEAEA |
| GDF15(T296R) | | MCTSFKENPTTFMGHYLHEVARRHPYFYAPELLYYAEQYNEILTQCCAEADKESCLTPKLD |
| | | GVKEKALVSSVRQRMKCSSMQKFGERAFKAWAVARLSQTFPNADFAEITKLATDLTKVNKE |
| | | CCHGDLLECADDRAELAKYMCENQATISSKLQTCCDKPLLKKAHCLSEVEHDTMPADLPAI |
| | | AADFVEDQEVCKNYAEAKDVFLGTFLYEYSRRHPDYSVSLLLRLAKKYEATLEKCCAEANP |
| | | PACYGTVLAEFQPLVEEPKNLVKTNCDLYEKLGEYGFQNAILVRYTQKAPQVSTPTLVEAA |
| | | RNLGRVGTKCCTLPEDQRLPCVEDYLSAILNRVCLLHEKTPVSEHVTKCCSGSLVERRPCF |
| | | SALTVDETYVPKEFKAETFTFHSDICTLPEKEKQIKKQTALAELVKHKPKATAEQLKTVMD |
| | | DFAQFLDTCCKAADKDTCFSTEGPNLVTRAKDALAGGGGSGGGGSGGGGSARNGDHCPLGP |
| | | GRCCRLHTVRASLEDLGWADWVLSPREVQVTMCIGACPSQFRAANMHAQIKTSLHRLKPDT |
| | | VPAPCCVPASYNPMVLIQKTDTGVSLQRYDDLLAKDCHCI |
| hGDF15-AHA- | 41 | AHAGDHCPLGPGRCCRLHTVRASLEDLGWADWVLSPREVQVTMCIGACPSQFRAANMHAQI |
| PEG24-FA, or | | KTSLHRLKPDTVPAPCCVPASYNPMVLIQKTDTGVSLQTYDDLLAKDCHCI |
| AHA-(200- | | |
| 308)-hGDF15 | | |
| GDF15 mutein | 42 | ARNGDHCPLGPGRCCRLHTVRASLEDLGWADWVLSPREVQVTMCIGACPSQFRAANMHAQ |
| v1 K69Q, | | IKTSLHRLQPDTVPAPCCVPASYNPMVLIQRTDTGVSLQTYDDLLARDCHCI |
| K107R | | |
| GDF15 mutein | 43 | ARNGDHCPLGPGRCCRLHTVRASLEDLGWADWVLSPREVQVTMCIGACPSQFRAANMHAQ |
| v2 K62Q, | | IQTSLHRLKPDTVPAPCCVPASYNPMVLIQRTDTGVSLQTYDDLLARDCHCI |
| K91R, K107R | | |
| GDF15 mutein | 44 | ARNGDHCPLGPGRCCRLHTVRASLEDLGWADWVLSPREVQVTMCIGACPSQFRAANMHAQ |
| v3 K62Q, | | IQTSLHRLQPDTVPAPCCVPASYNPMVLIQKTDTGVSLQTYDDLLARDCHCI |
| K69Q, K107R | | |
| GDF15 mutein | 45 | ARNGDHCPLGPGRCCRLHTVRASLEDLGWADWVLSPREVQVTMCIGACPSQFRAANMHAQ |
| v4 K62Q, | | IQTSLHRLQPDTVPAPCCVPASYNPMVLIQRTDTGVSLQTYDDLLAKDCHCI |
| K69Q, K91R | | |
| GDF15 mutein | 46 | ARNGDHCPLGPGRCCRLHTVRASLEDLGWADWVLSPREVQVTMCIGACPSQFRAANMHAQ |
| v5 K91R, | | IKTSLHRLKPDTVPAPCCVPASYNPMVLIQRTDTGVSLQTYDDLLARDCHCI |
| K107R | | |
| GDF15 mutein | 47 | ARNGDHCPLGPGRCCRLHTVRASLEDLGWADWVLSPREVQVTMCIGACPSQFRAANMHAQ |
| v6 K69Q, | | IKTSLHRLQPDTVPAPCCVPASYNPMVLIQKTDTGVSLQTYDDLLARDCHCI |
| K107R | | |
| GDF15 mutein | 48 | ARNGDHCPLGPGRCCRLHTVRASLEDLGWADWVLSPREVQVTMCIGACPSQFRAANMHAQ |
| v7 K69Q, | | IKTSLHRLQPDTVPAPCCVPASYNPMVLIQRTDTGVSLQTYDDLLAKDCHCI |
| K91R | | |
| GDF15 mutein | 49 | ARNGDHCPLGPGRCCRLQSLRASLEDLGWADWVLSPREVQVTMCIGACPSQFRAANMHAQ |
| v8 H18Q, | | IQTSLHRLQPDTVPAPCCVPASYNPMVLIQRTDTGVSLQTYDDLLARDCHCI |
| T19S, V20L, | | |
| K62Q, K69Q, | | |
| K91R, K107R | | |
| GDF15 mutein | 50 | ARNGDHCPLGPGRCCRLQSLRASLEDLGWADWVLSPREVQVTMCIGACPSQFRAANMHAQ |
| v9 H18Q, | | IQTSLHRLKPDTVPAPCCVPASYNPMVLIQRTDTGVSLQTYDDLLARDCHCI |
| T19S, V20L, | | |
| K62Q, K91R, | | |
| K107R | | |
| GDF15 mutein | 51 | ARNGDHCPLGPGRCCRLQSLRASLEDLGWADWVLSPREVQVTMCIGACPSQFRAANMHAQ |
| v10 H18Q, | | IQTSLHRLQPDTVPAPCCVPASYNPMVLIQKTDTGVSLQTYDDLLARDCHCI |
| T19S, V20L, | | |
| K62Q, K69Q, | | |
| K107R | | |
| GDF15 mutein | 52 | ARNGDHCPLGPGRCCRLQSLRASLEDLGWADWVLSPREVQVTMCIGACPSQFRAANMHAQ |
| v11 H18Q, | | IQTSLHRLQPDTVPAPCCVPASYNPMVLIQRTDTGVSLQTYDDLLAKDCHCI |
| T19S, V20L, | | |
| K62Q, K69Q, | | |
| K91R | | |
| GDF15 mutein | 53 | PARNGDHCPLGPGRCCRLHTVRASLEDLGWADWVLSPREVQVTMCIGACPSQFRAANMHA |
| v12 NPro- | | QIKTSLHRLKPDTVPAPCCVPASYNPMVLIQKTDTGVSLQTYDDLLAKDCHCI |
| GDF15 | | |
| GDF15 mutein | 54 | PARNGDHCPLGPGRCCRLHTVRASLEDLGWADWVLSPREVQVTMCIGACPSQFRAANMHA |
| v13 NPro, | | QIKTSLHRLQPDTVPAPCCVPASYNPMVLIQRTDTGVSLQTYDDLLARDCHCI |
| K70Q, K92R | | |
| GDF15 mutein | 55 | PARNGDHCPLGPGRCCRLHTVRASLEDLGWADWVLSPREVQVTMCIGACPSQFRAANMHA |
| v14 NPro, | | QIQTSLHRLKPDTVPAPCCVPASYNPMVLIQRTDTGVSLQTYDDLLARDCHCI |
| K63Q, K92R, | | |
| K108R | | |
| GDF15 mutein | 56 | PARNGDHCPLGPGRCCRLHTVRASLEDLGWADWVLSPREVQVTMCIGACPSQFRAANMHA |
| v15 NPro, | | QIQTSLHRLQPDTVPAPCCVPASYNPMVLIQKTDTGVSLQTYDDLLARDCHCI |
| K63Q, K70Q, | | |
| K108R | | |
| GDF15 mutein | 57 | PARNGDHCPLGPGRCCRLHTVRASLEDLGWADWVLSPREVQVTMCIGACPSQFRAANMHA |
| v16 NPro, | | QIQTSLHRLQPDTVPAPCCVPASYNPMVLIQRTDTGVSLQTYDDLLAKDCHCI |
| K63Q, K70Q, | | |
| K92R | | |
| GDF15 mutein | 58 | PARNGDHCPLGPGRCCRLHTVRASLEDLGWADWVLSPREVQVTMCIGACPSQFRAANMHA |
| v17 NPro, | | QIKTSLHRLKPDTVPAPCCVPASYNPMVLIQRTDTGVSLQTYDDLLARDCHCI |
| K92R, K108R | | |
| GDF15 mutein | 59 | PARNGDHCPLGPGRCCRLHTVRASLEDLGWADWVLSPREVQVTMCIGACPSQFRAANMHA |
| v18 NPro, | | QIKTSLHRLQPDTVPAPCCVPASYNPMVLIQKTDTGVSLQTYDDLLARDCHCI |
| K70Q, K108R | | |
| GDF15 mutein | 60 | PARNGDHCPLGPGRCCRLHTVRASLEDLGWADWVLSPREVQVTMCIGACPSQFRAANMHA |
| v19 NPro, | | QIKTSLHRLQPDTVPAPCCVPASYNPMVLIQRTDTGVSLQTYDDLLAKDCHCI |
| K70Q, K92R | | |
| GDF15 mutein | 61 | PARNGDHCPLGPGRCCRLQSLRASLEDLGWADWVLSPREVQVTMCIGACPSQFRAANMHA |
| v20 NPro, | | QIQTSLHRLQPDTVPAPCCVPASYNPMVLIQRTDTGVSLQTYDDLLARDCHCI |
| H19Q, T20S, | | |
| V21L, K63Q, | | |
| K70Q, K92R, | | |
| K108R | | |
| GDF15 mutein | 62 | PARNGDHCPLGPGRCCRLQSLRASLEDLGWADWVLSPREVQVTMCIGACPSQFRAANMHA |
| v21 NPro, | | QIQTSLHRLKPDTVPAPCCVPASYNPMVLIQRTDTGVSLQTYDDLLARDCHCI |
| H19Q, T20S, | | |
| V21L, K63Q, | | |
| K92R, K108R | | |
| GDF15 mutein | 63 | PARNGDHCPLGPGRCCRLQSLRASLEDLGWADWVLSPREVQVTMCIGACPSQFRAANMHA |
| v22 NPro, | | QIQTSLHRLQPDTVPAPCCVPASYNPMVLIQKTDTGVSLQTYDDLLARDCHCI |
| H19Q, T20S, | | |
| V21L, K63Q, | | |
| K70Q, K108R | | |
| GDF15 mutein | 64 | PARNGDHCPLGPGRCCRLQSLRASLEDLGWADWVLSPREVQVTMCIGACPSQFRAANMHA |
| v23 NPro, | | QIQTSLHRLQPDTVPAPCCVPASYNPMVLIQRTDTGVSLQTYDDLLAKDCHCI |
| H19Q, T20S, | | |
| V21L, K63Q, | | |
| K70Q, K92R | | |
| Fusion | 65 | MDMRVPAQLLGLLLLWLRGARCDAHKSEVAHRFKDLGEENFKALVLIAFAQYLQQCPFED |
| molecule HSA | | HVKLVNEVTEFAKTCVADESAENCDKSLHTLFGDKLCTVATLRETYGEMADCCAKQEPER |
| with IgK | | NECFLQHKDDNPNLPRLVRPEVDVMCTAFHDNEETFLKKYLYEIARRHPYFYAPELLFFA |
| signal | | KRYKAAFTECCQAADKAACLLPKLDELRDEGKASSAKQRLKCASLQKFGERAFKAWAVAR |
| sequence | | LSQRFPKAEFAEVSKLVTDLTKVHTECCHGDLLECADDRADLAKYICENQDSISSKLKEC |
| fused to N- | | CEKPLLEKSHCIAEVENDEMPADLPSLAADFVESKDVCKNYAEAKDVFLGMFLYEYARRH |
| terminus of | | PDYSVVLLLRLAKTYETTLEKCCAAADPHECYAKVFDEFKPLVEEPQNLIKQNCELFEQL |
| mature human | | GEYKFQNALLVRYTKKVPQVSTPTLVEVSRNLGKVGSKCCKHPEAKRMPCAEDYLSVVLN |
| GDF15 (wild- | | QLCVLHEKTPVSDRVTKCCTESLVNRRPCFSALEVDETYVPKEFNAETFTFHADICTLSE |
| type) | | KERQIKKQTALVELVKHKPKATKEQLKAVMDDFAAFVEKCCKADDKETCFAEEGKKLVAA |
| through a | | SQAALGLGGGGSGGGGSIEGRARNGDHCPLGPGRCCRLHTVRASLEDLGWADWVLSPREV |
| protease- | | QVTMCIGACPSQFRAANMHAQIKTSLHRLKPDTVPAPCCVPASYNPMVLIQKTDTGVSLQ |
| sensitive | | TYDDLLAKDCHCI |
| cleavable | | |
| linker | | |
| Fusion | 66 | DAHKSEVAHRFKDLGEENFKALVLIAFAQYLQQCPFEDHVKLVNEVTEFAKTCVADESAE |
| molecule HSA | | NCDKSLHTLFGDKLCTVATLRETYGEMADCCAKQEPERNECFLQHKDDNPNLPRLVRPEV |
| fused to N- | | DVMCTAFHDNEETFLKKYLYEIARRHPYFYAPELLFFAKRYKAAFTECCQAADKAACLLP |
| terminus of | | KLDELRDEGKASSAKQRLKCASLQKFGERAFKAWAVARLSQRFPKAEFAEVSKLVTDLTK |
| mature human | | VHTECCHGDLLECADDRADLAKYICENQDSISSKLKECCEKPLLEKSHCIAEVENDEMPA |
| GDF15 (wild- | | DLPSLAADFVESKDVCKNYAEAKDVFLGMFLYEYARRHPDYSVVLLLRLAKTYETTLEKC |
| type) | | CAAADPHECYAKVFDEFKPLVEEPQNLIKQNCELFEQLGEYKFQNALLVRYTKKVPQVST |
| through a | | PTLVEVSRNLGKVGSKCCKHPEAKRMPCAEDYLSVVLNQLCVLHEKTPVSDRVTKCCTES |
| protease- | | LVNRRPCFSALEVDETYVPKEFNAETFTFHADICTLSEKERQIKKQTALVELVKHKPKAT |
| sensitive | | KEQLKAVMDDFAAFVEKCCKADDKETCFAEEGKKLVAASQAALGLGGGGSGGGGSIEGRA |
| cleavable | | RNGDHCPLGPGRCCRLHTVRASLEDLGWADWVLSPREVQVTMCIGACPSQFRAANMHAQI |
| linker | | KTSLHRLKPDTVPAPCCVPASYNPMVLIQKTDTGVSLQTYDDLLAKDCHCI |
| Fusion | 67 | MDMRVPAQLLGLLLLWLRGARCDAHKSEVAHRFKDLGEENFKALVLIAFAQYLQQCPFED |
| molecule HSA | | HVKLVNEVTEFAKTCVADESAENCDKSLHTLFGDKLCTVATLRETYGEMADCCAKQEPER |
| with IgK | | NECFLQHKDDNPNLPRLVRPEVDVMCTAFHDNEETFLKKYLYEIARRHPYFYAPELLFFA |
| signal | | KRYKAAFTECCQAADKAACLLPKLDELRDEGKASSAKQRLKCASLQKFGERAFKAWAVAR |
| sequence | | LSQRFPKAEFAEVSKLVTDLTKVHTECCHGDLLECADDRADLAKYICENQDSISSKLKEC |
| fused to N- | | CEKPLLEKSHCIAEVENDEMPADLPSLAADFVESKDVCKNYAEAKDVFLGMFLYEYARRH |
| terminus of | | PDYSVVLLLRLAKTYETTLEKCCAAADPHECYAKVFDEFKPLVEEPQNLIKQNCELFEQL |
| mature human | | GEYKFQNALLVRYTKKVPQVSTPTLVEVSRNLGKVGSKCCKHPEAKRMPCAEDYLSVVLN |
| GDF15 (wild- | | QLCVLHEKTPVSDRVTKCCTESLVNRRPCFSALEVDETYVPKEFNAETFTFHADICTLSE |
| type) | | KERQIKKQTALVELVKHKPKATKEQLKAVMDDFAAFVEKCCKADDKETCFAEEGKKLVAA |
| through a | | SQAALGLGGGGSGGGGSGGGGSARNGDHCPLGPGRCCRLHTVRASLEDLGWADWVLSPRE |
| non- | | VQVTMCIGACPSQFRAANMHAQIKTSLHRLKPDTVPAPCCVPASYNPMVLIQKTDTGVSL |
| cleavable | | QTYDDLLAKDCHCI |
| linker | | |
| Fusion | 68 | DAHKSEVAHRFKDLGEENFKALVLIAFAQYLQQCPFEDHVKLVNEVTEFAKTCVADESAE |
| molecule HSA | | NCDKSLHTLFGDKLCTVATLRETYGEMADCCAKQEPERNECFLQHKDDNPNLPRLVRPEV |
| fused to N- | | DVMCTAFHDNEETFLKKYLYEIARRHPYFYAPELLFFAKRYKAAFTECCQAADKAACLLP |
| terminus of | | KLDELRDEGKASSAKQRLKCASLQKFGERAFKAWAVARLSQRFPKAEFAEVSKLVTDLTK |
| mature human | | VHTECCHGDLLECADDRADLAKYICENQDSISSKLKECCEKPLLEKSHCIAEVENDEMPA |
| GDF15 (wild- | | DLPSLAADFVESKDVCKNYAEAKDVFLGMFLYEYARRHPDYSVVLLLRLAKTYETTLEKC |
| type) | | CAAADPHECYAKVFDEFKPLVEEPQNLIKQNCELFEQLGEYKFQNALLVRYTKKVPQVST |
| through a | | PTLVEVSRNLGKVGSKCCKHPEAKRMPCAEDYLSVVLNQLCVLHEKTPVSDRVTKCCTES |
| non- | | LVNRRPCFSALEVDETYVPKEFNAETFTFHADICTLSEKERQIKKQTALVELVKHKPKAT |
| cleavable | | KEQLKAVMDDFAAFVEKCCKADDKETCFAEEGKKLVAASQAALGLGGGGSGGGGSGGGGS |
| linker | | ARNGDHCPLGPGRCCRLHTVRASLEDLGWADWVLSPREVQVTMCIGACPSQFRAANMHAQ |
| | | IKTSLHRLKPDTVPAPCCVPASYNPMVLIQKTDTGVSLQTYDDLLAKDCHCI |
| Mature human | 69 | ARNGDHCPLGPGRCCRLHTVRASLEDLGAADWVLSPREVQVTMCIGACPSQFRAANMHAQ |
| GDF15 | | IKTSLHRLKPDTVPAPCCVPASYNPMVLIQKTDTGVSLQTYDDLLAKDCHCI |
| Alanine | | |
| mutant w29 | | |
| Mature human | 70 | ARNGDHCPLGPGRCCRLHTVRASLEDLGWADAVLSPREVQVTMCIGACPSQFRAANMHAQ |
| GDF15 | | IKTSLHRLKPDTVPAPCCVPASYNPMVLIQKTDTGVSLQTYDDLLAKDCHCI |
| Alanine | | |
| mutant w32 | | |
| Mature human | 71 | ARNGDHCPLGPGRCCRLHTVRASLEDLGWADWVLSPREVQVTMCIGACPSQARAANMHAQ |
| GDF15 | | IKTSLHRLKPDTVPAPCCVPASYNPMVLIQKTDTGVSLQTYDDLLAKDCHCI |
| Alanine | | |
| mutant w52 | | |
| Mature human | 72 | ARNGDHCPLGPGRCCRLHTVRASLEDLGWADWVLSPREVQVTMCIGACPSQFRAANMHAQ |
| GDF15 | | IKTSAHRLKPDTVPAPCCVPASYNPMVLIQKTDTGVSLQTYDDLLAKDCHCI |
| Alanine | | |
| mutant w65 | | |
| Mature human | 73 | ARNGDHCPLGPGRCCRLHTVRASLEDLGWADWVLSPREVQVTMCIGACPSQFRAANMHAQ |
| GDF15 | | IKTSLHRAKPDTVPAPCCVPASYNPMVLIQKTDTGVSLQTYDDLLAKDCHCI |
| Alanine | | |
| mutant w68 | | |
| Mature human | 74 | ARNGDHCPLGPGRCCRLHTVRASLEDLGWADWVLSPREVQVTMCIGACPSQFRAANMHAQ |
| GDF15 | | IKTSLHRLKPDTVPAPCCVPASYNPMVLAQKTDTGVSLQTYDDLLAKDCHCI |
| Alanine | | |
| mutant w89 | | |
| Mature human | 75 | ARNGDHCPLGPGRCCRLHTVRASLAALGWAAWVLSPREVQVTMCIGACPSQFRAANMHAQ |
| GDF15 | | IKTSLHRLKPDTVPAPCCVPASYNPMVLIQKTDTGVSLQTYDDLLAKDCHCI |
| Alanine | | |
| mutant w113 | | |
| Mature human | 76 | ARNGDHCPLGPGRCCRLHTVRASLAALGWAAWVLSPRAVQVTMCIGACPSQFRAANMHAQ |
| GDF15 | | IKTSLHRLKPDTVPAPCCVPASYNPMVLIQKTDTGVSLQTYDDLLAKDCHCI |
| Alanine | | |
| mutant w114 | | |
| Mature human | 77 | ARNGDHCPLGPGRCCRLHTVRASLEDLGWADWVLSPREVQVTMCIGACPSQFRAANMHAQ |
| GDF15 | | IKTSLHRLKPDTVPAPCCVPASYNPMVLIQKTDTGVSLQTYAALLAKACHCI |
| Alanine | | |
| mutant w115 | | |
| Mature human | 78 | ARNGDHCPLGPGRCCRLHTVRASLEDLGWADWVLSPREVQVTMCIGACPSQFRAANMHAQ |
| GDF15 | | IKTSLHRLKPDTVPAPCCVPASYNPMVLIQKTATGVSLQTYAALLAKACHCI |
| Alanine | | |
| mutant w116 | | |
| Mature human | 79 | ARNGDHCPLGPGRCCRLHTVRASLEDLGWADWVLSPREVQVTMCIGACPSQFRAANMHAQ |
| GDF15 | | IKTSLHRLKPDTVPAPCCVPASYNPMVLIQKTATGVSLQTYDDLLAKDCHCI |
| Alanine | | |
| mutant w117 | | |
| Mature human | 80 | ARNGTHCPLGPGRCCRLHTVRASLEDLGWADWVLSPREVQVTMCIGACPSQFRAANMHAQ |
| GDF15 N- | | IKTSLHRLKPDTVPAPCCVPASYNPMVLIQKTDTGVSLQTYDDLLAKDCHCI |
| glycosylation | | |
| mutant | | |
| w118 | | |
| Mature human | 81 | ARNGDHCPLGPGRCCRNHTVRASLEDLGWADWVLSPREVQVTMCIGACPSQFRAANMHAQ |
| GDF15 N- | | IKTSLHRLKPDTVPAPCCVPASYNPMVLIQKTDTGVSLQTYDDLLAKDCHCI |
| glycosylation | | |
| mutant | | |
| w119 | | |
| Mature human | 82 | ARNGDHCPLGPGRCCRLHTVNASLEDLGWADWVLSPREVQVTMCIGACPSQFRAANMHAQ |
| GDF15 N- | | IKTSLHRLKPDTVPAPCCVPASYNPMVLIQKTDTGVSLQTYDDLLAKDCHCI |
| glycosylation | | |
| mutant | | |
| w120 | | |
| Mature human | 83 | ARNGDHCPLGPGRCCRLHTVRASLEDLGWADWNLSPREVQVTMCIGACPSQFRAANMHAQ |
| GDF15 N- | | IKTSLHRLKPDTVPAPCCVPASYNPMVLIQKTDTGVSLQTYDDLLAKDCHCI |
| glycosylation | | |
| mutant | | |
| w121 | | |
| Mature human | 84 | ARNGDHCPLGPGRCCRLHTVRASLEDLGWADWVLSPREVNVTMCIGACPSQFRAANMHAQ |
| GDF15 N- | | IKTSLHRLKPDTVPAPCCVPASYNPMVLIQKTDTGVSLQTYDDLLAKDCHCI |
| glycosylation | | |
| mutant | | |
| w122 | | |
| Mature human | 85 | ARNGDHCPLGPGRCCRLHTVRASLEDLGWADWVLSPREVQVTMCIGACPSQFRAANMTAQ |
| GDF15 N- | | IKTSLHRLKPDTVPAPCCVPASYNPMVLIQKTDTGVSLQTYDDLLAKDCHCI |
| glycosylation | | |
| mutant | | |
| w123 | | |
| Mature human | 86 | ARNGDHCPLGPGRCCRLHTVRASLEDLGWADWVLSPREVQVTMCIGACPSQFRAANMHAQ |
| GDF15 N- | | NKTSLHRLKPDTVPAPCCVPASYNPMVLIQKTDTGVSLQTYDDLLAKDCHCI |
| glycosylation | | |
| mutant | | |
| w124 | | |
| Mature human | 87 | ARNGDHCPLGPGRCCRLHTVRASLEDLGWADWVLSPREVQVTMCIGACPSQFRAANMHAQ |
| GDF15 N- | | INTSLHRLKPDTVPAPCCVPASYNPMVLIQKTDTGVSLQTYDDLLAKDCHCI |
| glycosylation | | |
| mutant | | |
| w125 | | |
| Mature human | 88 | ARNGDHCPLGPGRCCRLHTVRASLEDLGWADWVLSPREVQVTMCIGACPSQFRAANMHAQ |
| GDF15 N- | | IKTSLHRLKNDTVPAPCCVPASYNPMVLIQKTDTGVSLQTYDDLLAKDCHCI |
| glycosylation | | |
| mutant | | |
| w126 | | |
| Mature human | 89 | ARNGDHCPLGPGRCCRLHTVRASLEDLGWADWVLSPREVQVTMCIGACPSQFRAANMHAQ |
| GDF15 N- | | IKTSLHRLKPDTVPAPCCVNASYNPMVLIQKTDTGVSLQTYDDLLAKDCHCI |
| glycosylation | | |
| mutant | | |
| w127 | | |
| Mature human | 90 | ARNGDHCPLGPGRCCRLHTVRASLEDLGWADWVLSPREVQVTMCIGACPSQFRAANMHAQ |
| GDF15 N- | | IKTSLHRLKPDTVPAPCCVPASYNPMVLINKTDTGVSLQTYDDLLAKDCHCI |
| glycosylation | | |
| mutant | | |
| w128 | | |
| Mature human | 91 | ARNGDHCPLGPGRCCRLHTVRASLEDLGWADWVLSPREVQVTMCIGACPSQFRAANMHAQ |
| GDF15 N- | | IKTSLHRLKPDTVPAPCCVPASYNPMVLIQKNDTGVSLQTYDDLLAKDCHCI |
| glycosylation | | |
| mutant | | |
| w129 | | |
| Mature human | 92 | ARNGDHCPLGPGRCCRLHTVRASLEDLGWADWVLSPREVQVTMCIGACPSQFRAANMHAQ |
| GDF15 N- | | IKTSLHRLKPDTVPAPCCVPASYNPMVLIQKTDTNVSLQTYDDLLAKDCHCI |
| glycosylation | | |
| mutant | | |
| w130 | | |
| Mature human | 93 | ARNGDHCPLGPGRCCRLHTVRASLEDLGWADWVLSPREVQVTMCIGACPSQFRAANMHAQ |
| GDF15 N- | | IKTSLHRLKPDTVPAPCCVPASYNPMVLIQKTDTGVSNQTYDDLLAKDCHCI |
| glycosylation | | |
| mutant | | |
| w131 | | |
| Mature human | 94 | ARNGTHCPLGPGRCCRLHTVRASLEDLGWADWVLSPREVQVTMCIGACPSQFRAANMHAQ |
| GDF15 N- | | IKTSLHRLKPDTVPAPCCVPASYNPMVLINKTDTGVSLQTYDDLLAKDCHCI |
| glycosylation | | |
| mutant | | |
| w132 | | |
| Mature human | 95 | ARNGTHCPLGPGRCCRLHTVRASLEDLGWADWVLSPREVQVTMCIGACPSQFRAANMHAQ |
| GDF15 N- | | IKTSLHRLKPDTVPAPCCVPASYNPMVLIQKTDTNVSLQTYDDLLAKDCHCI |
| glycosylation | | |
| mutant | | |
| w133 | | |
| Mature human | 96 | ARNGDHCPLGPGRCCRLHTVRASLEDLGWADWVLSPREVNVTMCIGACPSQFRAANMHAQ |
| GDF15 N- | | IKTSLHRLKPDTVPAPCCVPASYNPMVLINKTDTGVSLQTYDDLLAKDCHCI |
| glycosylation | | |
| mutant | | |
| w134 | | |
| Mature human | 97 | ARNGDHCPLGPGRCCRLHTVRASLEDLGWADWVLSPREVNVTMCIGACPSQFRAANMHAQ |
| GDF15 N- | | IKTSLHRLKPDTVPAPCCVPASYNPMVLIQKTDTNVSLQTYDDLLAKDCHCI |
| glycosylation | | |
| mutant | | |
| w135 | | |
| Mature human | 98 | ARNGDHCPLGPGRCCRLHTVRASLEDLGWADWVLSPREVQVTMCIGACPSQFRAANMHAQ |
| GDF15 N- | | IKTSLHRLKNDTVPAPCCVPASYNPMVLINKTDTGVSLQTYDDLLAKDCHCI |
| glycosylation | | |
| mutant | | |
| w136 | | |
| Mature human | 99 | ARNGDHCPLGPGRCCRLHTVRASLEDLGWADWVLSPREVQVTMCIGACPSQFRAANMHAQ |
| GDF15 N- | | IKTSLHRLKNDTVPAPCCVPASYNPMVLIQKTDTNVSLQTYDDLLAKDCHCI |
| glycosylation | | |
| mutant | | |
| w137 | | |
| Mature human | 100 | ARNGDHCPLGPGRCCRLHTVRASLEDLGWADWVLSPREVQVTMCIGACPSQFRAANMHAQ |
| GDF15 N- | | IKTSLHRLKPDTVPAPCCVPASYNPMVLINKTDTNVSLQTYDDLLAKDCHCI |
| glycosylation | | |
| mutant | | |
| w138 | | |
| Mature human | 101 | ARNGDHCPLGPGRCCRLHTVRASLEDLGWADWVLSPREVQVTMCIGACPSQFRAANMHAQ |
| GDF15 N- | | IKTSLHRLKPDTVPAPCCVPASYNPMVLINKTDTGVSNQTYDDLLAKDCHCI |
| glycosylation | | |
| mutant | | |
| w139 | | |
| Mature human | 102 | ARNGDHCPLGPGRCCRLHTVRASLEDLGWADWVLSPREVQVTMCIGACPSQFRAANMHAQ |
| GDF15 N- | | IKTSLHRLKPDTVPAPCCVPASYNPMVLIQKTDTNVSNQTYDDLLAKDCHCI |
| glycosylation | | |
| mutant | | |
| w140 | | |
| Mature human | 103 | MEWSWVFLFFLSVTTGVHSARNGDHCPLGPGRCCRLHTVRASLEDLGWADWVLSPREVQV |
| GDF15 with a | | TMCIGACPSQFRAANMHAQIKTSLHRLKPDTVPAPCCVPASYNPMVLIQKTDTGVSLQTY |
| VH21 signal | | DDLLAKDCHCI |
| sequence | | |
| Mature human | 104 | MEWSWVFLFFLSVTTGVHSARNGDDCPLGPGRCCRLHTVRASLEDLGWADWVLSPREVQV |
| GDF15 H6D | | TMCIGACPSQFRAANMHAQIKTSLHRLKPDTVPAPCCVPASYNPMVLIQKTDTGVSLQTY |
| variant with | | DDLLAKDCHCI |
| a VH21 | | |
| signal | | |
| sequence | | |
| Mature human | 105 | ARNGDDCPLGPGRCCRLHTVRASLEDLGWADWVLSPREVQVTMCIGACPSQFRAANMHAQ |
| GDF15 H6D | | IKTSLHRLKPDTVPAPCCVPASYNPMVLIQKTDTGVSLQTYDDLLAKDCHCI |
| variant | | |
| Mature human | 106 | MEWSWVFLFFLSVTTGVHSARQGDHCPLGPGRCCRLHTVRASLEDLGWADWVLSPREVQV |
| GDF15 N3Q | | TMCIGACPSQFRAANMHAQIKTSLHRLKPDTVPAPCCVPASYNPMVLIQKTDTGVSLQTY |
| variant with | | DDLLAKDCHCI |
| a VH21 | | |
| signal | | |
| sequence | | |
| Mature human | 107 | ARQGDHCPLGPGRCCRLHTVRASLEDLGWADWVLSPREVQVTMCIGACPSQFRAANMHAQ |
| GDF15 N3Q | | IKTSLHRLKPDTVPAPCCVPASYNPMVLIQKTDTGVSLQTYDDLLAKDCHCI |
| variant | | |
| DhCpmFc(+) | 108 | APELLGGPSVFLFPPKPKDTLMISRTPEVTCVVVDVSHEDPEVKFNWYVDGVEVHNAKTK |
| | | PREEQYNSTYRVVSVLTVLHQDWLNGKEYKCKVSNKALPAPIEKTISKAKGQPREPQVYT |
| | | LPPSRKEMTKNQVSLTCLVKGFYPSDIAVEWESNGQPENNYKTTPPVLKSDGSFFLYSKL |
| | | TVDKSRWQQGNVFSCSVMHEALHNHYTQKSLSLSPGK |
| DhCpmFc(−)- | 109 | APELLGGPSVFLFPPKPKDTLMISRTPEVTCVVVDVSHEDPEVKFNWYVDGVEVHNAKTK |
| (G4S)4-GDF15 | | PREEQYNSTYRVVSVLTVLHQDWLNGKEYKCKVSNKALPAPIEKTISKAKGQPREPQVYT |
| | | LPPSREEMTKNQVSLTCLVKGFYPSDIAVEWESNGQPENNYDTTPPVLDSDGSFFLYSDL |
| | | TVDKSRWQQGNVFSCSVMHEALHNHYTQKSLSLSPGGGGGSGGGGSGGGGSGGGGSARNG |
| | | DHCPLGPGRCCRLHTVRASLEDLGWADWVLSPREVQVTMCIGACPSQFRAANMHAQIKTS |
| | | LHRLKPDTVPAPCCVPASYNPMVLIQKTDTGVSLQTYDDLLAKDCHCI |
| DhCpmFc(+) | 110 | MEWSWVFLFFLSVTTGVHSAPELLGGPSVFLFPPKPKDTLMISRTPEVTCVVVDVSHEDP |
| with a VH21 | | EVKFNWYVDGVEVHNAKTKPREEQYNSTYRVVSVLTVLHQDWLNGKEYKCKVSNKALPAP |
| signal | | IEKTISKAKGQPREPQVYTLPPSRKEMTKNQVSLTCLVKGFYPSDIAVEWESNGQPENNY |
| sequence | | KTTPPVLKSDGSFFLYSKLTVDKSRWQQGNVFSCSVMHEALHNHYTQKSLSLSPGK |
| DhCpmFc(−)- | 111 | MEWSWVFLFFLSVTTGVHSAPELLGGPSVFLFPPKPKDTLMISRTPEVTCVVVDVSHEDP |
| (G4S)4-GDF15 | | EVKFNWYVDGVEVHNAKTKPREEQYNSTYRVVSVLTVLHQDWLNGKEYKCKVSNKALPAP |
| with a VH21 | | IEKTISKAKGQPREPQVYTLPPSREEMTKNQVSLTCLVKGFYPSDIAVEWESNGQPENNY |
| signal | | DTTPPVLDSDGSFFLYSDLTVDKSRWQQGNVFSCSVMHEALHNHYTQKSLSLSPGGGGGS |
| sequence | | GGGGSGGGGSGGGGSARNGDHCPLGPGRCCRLHTVRASLEDLGWADWVLSPREVQVTMCI |
| | | GACPSQFRAANMHAQIKTSLHRLKPDTVPAPCCVPASYNPMVLIQKTDTGVSLQTYDDLL |
| | | AKDCHCI |
| DhCpmFc(−) | 112 | APELLGGPSVFLFPPKPKDTLMISRTPEVTCVVVDVSHEDPEVKFNWYVDGVEVHNAKTK |
| | | PREEQYNSTYRVVSVLTVLHQDWLNGKEYKCKVSNKALPAPIEKTISKAKGQPREPQVYT |
| | | LPPSREEMTKNQVSLTCLVKGFYPSDIAVEWESNGQPENNYDTTPPVLDSDGSFFLYSDL |
| | | TVDKSRWQQGNVFSCSVMHEALHNHYTQKSLSLSPGK |
| DhCpmFc(+)- | 113 | APELLGGPSVFLFPPKPKDTLMISRTPEVTCVVVDVSHEDPEVKFNWYVDGVEVHNAKTK |
| (G4S)4-GDF15 | | PREEQYNSTYRVVSVLTVLHQDWLNGKEYKCKVSNKALPAPIEKTISKAKGQPREPQVYT |
| | | LPPSRKEMTKNQVSLTCLVKGFYPSDIAVEWESNGQPENNYKTTPPVLKSDGSFFLYSKL |
| | | TVDKSRWQQGNVFSCSVMHEALHNHYTQKSLSLSPGGGGGSGGGGSGGGGSGGGGSARNG |
| | | DHCPLGPGRCCRLHTVRASLEDLGWADWVLSPREVQVTMCIGACPSQFRAANMHAQIKTS |
| | | LHRLKPDTVPAPCCVPASYNPMVLIQKTDTGVSLQTYDDLLAKDCHCI |
| DhCpmFc(−) | 114 | MEWSWVFLFFLSVTTGVHSAPELLGGPSVFLFPPKPKDTLMISRTPEVTCVVVDVSHEDP |
| with a VH21 | | EVKFNWYVDGVEVHNAKTKPREEQYNSTYRVVSVLTVLHQDWLNGKEYKCKVSNKALPAP |
| signal | | IEKTISKAKGQPREPQVYTLPPSREEMTKNQVSLTCLVKGFYPSDIAVEWESNGQPENNY |
| sequence | | DTTPPVLDSDGSFFLYSDLTVDKSRWQQGNVFSCSVMHEALHNHYTQKSLSLSPGK |
| DhCpmFc(+)- | 115 | MEWSWVFLFFLSVTTGVHSAPELLGGPSVFLFPPKPKDTLMISRTPEVTCVVVDVSHEDP |
| (G4S)4-GDF15 | | EVKFNWYVDGVEVHNAKTKPREEQYNSTYRVVSVLTVLHQDWLNGKEYKCKVSNKALPAP |
| with a VH21 | | IEKTISKAKGQPREPQVYTLPPSRKEMTKNQVSLTCLVKGFYPSDIAVEWESNGQPENNY |
| signal | | KTTPPVLKSDGSFFLYSKLTVDKSRWQQGNVFSCSVMHEALHNHYTQKSLSLSPGGGGGS |
| sequence | | GGGGSGGGGSGGGGSARNGDHCPLGPGRCCRLHTVRASLEDLGWADWVLSPREVQVTMCI |
| | | GACPSQFRAANMHAQIKTSLHRLKPDTVPAPCCVPASYNPMVLIQKTDTGVSLQTYDDLL |
| | | AKDCHCI |
| DhCpmFc(−)- | 116 | APELLGGPSVFLFPPKPKDTLMISRTPEVTCVVVDVSHEDPEVKFNWYVDGVEVHNAKTK |
| (G4S)4- | | PREEQYNSTYRVVSVLTVLHQDWLNGKEYKCKVSNKALPAPIEKTISKAKGQPREPQVYT |
| GDF15(H6D) | | LPPSREEMTKNQVSLTCLVKGFYPSDIAVEWESNGQPENNYDTTPPVLDSDGSFFLYSDL |
| | | TVDKSRWQQGNVFSCSVMHEALHNHYTQKSLSLSPGGGGGSGGGGSGGGGSGGGGSARNG |
| | | DDCPLGPGRCCRLHTVRASLEDLGWADWVLSPREVQVTMCIGACPSQFRAANMHAQIKTS |
| | | LHRLKPDTVPAPCCVPASYNPMVLIQKTDTGVSLQTYDDLLAKDCHCI |
| DhCpmFc(−)- | 117 | MEWSWVFLFFLSVTTGVHSAPELLGGPSVFLFPPKPKDTLMISRTPEVTCVVVDVSHEDP |
| (G4S)4- | | EVKFNWYVDGVEVHNAKTKPREEQYNSTYRVVSVLTVLHQDWLNGKEYKCKVSNKALPAP |
| GDF15(H6D) | | IEKTISKAKGQPREPQVYTLPPSREEMTKNQVSLTCLVKGFYPSDIAVEWESNGQPENNY |
| with a VH21 | | DTTPPVLDSDGSFFLYSDLTVDKSRWQQGNVFSCSVMHEALHNHYTQKSLSLSPGGGGGS |
| signal | | GGGGSGGGGSGGGGSARNGDDCPLGPGRCCRLHTVRASLEDLGWADWVLSPREVQVTMCI |
| sequence | | GACPSQFRAANMHAQIKTSLHRLKPDTVPAPCCVPASYNPMVLIQKTDTGVSLQTYDDLL |
| | | AKDCHCI |
| DhCpmFc(+)- | 118 | APELLGGPSVFLFPPKPKDTLMISRTPEVTCVVVDVSHEDPEVKFNWYVDGVEVHNAKTK |
| (G4S)4- | | PREEQYNSTYRVVSVLTVLHQDWLNGKEYKCKVSNKALPAPIEKTISKAKGQPREPQVYT |
| GDF15(H6D) | | LPPSRKEMTKNQVSLTCLVKGFYPSDIAVEWESNGQPENNYKTTPPVLKSDGSFFLYSKL |
| | | TVDKSRWQQGNVFSCSVMHEALHNHYTQKSLSLSPGGGGGSGGGGSGGGGSGGGGSARNG |
| | | DDCPLGPGRCCRLHTVRASLEDLGWADWVLSPREVQVTMCIGACPSQFRAANMHAQIKTS |
| | | LHRLKPDTVPAPCCVPASYNPMVLIQKTDTGVSLQTYDDLLAKDCHCI |
| DhCpmFc(+)- | 119 | MEWSWVFLFFLSVTTGVHSAPELLGGPSVFLFPPKPKDTLMISRTPEVTCVVVDVSHEDP |
| (G4S)4- | | EVKFNWYVDGVEVHNAKTKPREEQYNSTYRVVSVLTVLHQDWLNGKEYKCKVSNKALPAP |
| GDF15(H6D) | | IEKTISKAKGQPREPQVYTLPPSRKEMTKNQVSLTCLVKGFYPSDIAVEWESNGQPENNY |
| with a VH21 | | KTTPPVLKSDGSFFLYSKLTVDKSRWQQGNVFSCSVMHEALHNHYTQKSLSLSPGGGGGS |
| signal | | GGGGSGGGGSGGGGSARNGDDCPLGPGRCCRLHTVRASLEDLGWADWVLSPREVQVTMCI |
| sequence | | GACPSQFRAANMHAQIKTSLHRLKPDTVPAPCCVPASYNPMVLIQKTDTGVSLQTYDDLL |
| | | AKDCHCI |
| DhCpmFc(+)- | 120 | APELLGGPSVFLFPPKPKDTLMISRTPEVTCVVVDVSHEDPEVKFNWYVDGVEVHNAKTK |
| (G4S)4- | | PREEQYNSTYRVVSVLTVLHQDWLNGKEYKCKVSNKALPAPIEKTISKAKGQPREPQVYT |
| GDF15(N3Q) | | LPPSRKEMTKNQVSLTCLVKGFYPSDIAVEWESNGQPENNYKTTPPVLKSDGSFFLYSKL |
| | | TVDKSRWQQGNVFSCSVMHEALHNHYTQKSLSLSPGGGGGSGGGGSGGGGSGGGGSARQG |
| | | DHCPLGPGRCCRLHTVRASLEDLGWADWVLSPREVQVTMCIGACPSQFRAANMHAQIKTS |
| | | LHRLKPDTVPAPCCVPASYNPMVLIQKTDTGVSLQTYDDLLAKDCHCI |
| DhCpmFc(+)- | 121 | MEWSWVFLFFLSVTTGVHSAPELLGGPSVFLFPPKPKDTLMISRTPEVTCVVVDVSHEDP |
| (G4S)4- | | EVKFNWYVDGVEVHNAKTKPREEQYNSTYRVVSVLTVLHQDWLNGKEYKCKVSNKALPAP |
| GDF15(N3Q) | | IEKTISKAKGQPREPQVYTLPPSRKEMTKNQVSLTCLVKGFYPSDIAVEWESNGQPENNY |
| with a VH21 | | KTTPPVLKSDGSFFLYSKLTVDKSRWQQGNVFSCSVMHEALHNHYTQKSLSLSPGGGGGS |
| signal | | GGGGSGGGGSGGGGSARQGDHCPLGPGRCCRLHTVRASLEDLGWADWVLSPREVQVTMCI |
| sequence | | GACPSQFRAANMHAQIKTSLHRLKPDTVPAPCCVPASYNPMVLIQKTDTGVSLQTYDDLL |
| | | AKDCHCI |
| DhCpmFc(+)- | 122 | APELLGGPSVFLFPPKPKDTLMISRTPEVTCVVVDVSHEDPEVKFNWYVDGVEVHNAKTK |
| GDF15 | | PREEQYNSTYRVVSVLTVLHQDWLNGKEYKCKVSNKALPAPIEKTISKAKGQPREPQVYT |
| | | LPPSRKEMTKNQVSLTCLVKGFYPSDIAVEWESNGQPENNYKTTPPVLKSDGSFFLYSKL |
| | | TVDKSRWQQGNVFSCSVMHEALHNHYTQKSLSLSPGARNGDHCPLGPGRCCRLHTVRASL |
| | | EDLGWADWVLSPREVQVTMCIGACPSQFRAANMHAQIKTSLHRLKPDTVPAPCCVPASYN |
| | | PMVLIQKTDTGVSLQTYDDLLAKDCHCI |
| DhCpmFc(+)- | 123 | MEWSWVFLFFLSVTTGVHSAPELLGGPSVFLFPPKPKDTLMISRTPEVTCVVVDVSHEDP |
| GDF15 with a | | EVKFNWYVDGVEVHNAKTKPREEQYNSTYRVVSVLTVLHQDWLNGKEYKCKVSNKALPAP |
| VH21 signal | | IEKTISKAKGQPREPQVYTLPPSRKEMTKNQVSLTCLVKGFYPSDIAVEWESNGQPENNY |
| sequence | | KTTPPVLKSDGSFFLYSKLTVDKSRWQQGNVFSCSVMHEALHNHYTQKSLSLSPGARNGD |
| | | HCPLGPGRCCRLHTVRASLEDLGWADWVLSPREVQVTMCIGACPSQFRAANMHAQIKTSL |
| | | HRLKPDTVPAPCCVPASYNPMVLIQKTDTGVSLQTYDDLLAKDCHCI |
| DhCpmFc(+)- | 124 | APELLGGPSVFLFPPKPKDTLMISRTPEVTCVVVDVSHEDPEVKFNWYVDGVEVHNAKTK |
| G4-GDF15 | | PREEQYNSTYRVVSVLTVLHQDWLNGKEYKCKVSNKALPAPIEKTISKAKGQPREPQVYT |
| | | LPPSRKEMTKNQVSLTCLVKGFYPSDIAVEWESNGQPENNYKTTPPVLKSDGSFFLYSKL |
| | | TVDKSRWQQGNVFSCSVMHEALHNHYTQKSLSLSPGGGGGARNGDHCPLGPGRCCRLHTV |
| | | RASLEDLGWADWVLSPREVQVTMCIGACPSQFRAANMHAQIKTSLHRLKPDTVPAPCCVP |
| | | ASYNPMVLIQKTDTGVSLQTYDDLLAKDCHCI |
| DhCpmFc(+)- | 125 | MEWSWVFLFFLSVTTGVHSAPELLGGPSVFLFPPKPKDTLMISRTPEVTCVVVDVSHEDP |
| G4-GDF15 | | EVKFNWYVDGVEVHNAKTKPREEQYNSTYRVVSVLTVLHQDWLNGKEYKCKVSNKALPAP |
| with a VH21 | | IEKTISKAKGQPREPQVYTLPPSRKEMTKNQVSLTCLVKGFYPSDIAVEWESNGQPENNY |
| signal | | KTTPPVLKSDGSFFLYSKLTVDKSRWQQGNVFSCSVMHEALHNHYTQKSLSLSPGGGGGA |
| sequence | | RNGDHCPLGPGRCCRLHTVRASLEDLGWADWVLSPREVQVTMCIGACPSQFRAANMHAQI |
| | | KTSLHRLKPDTVPAPCCVPASYNPMVLIQKTDTGVSLQTYDDLLAKDCHCI |
| DhCpmFc(+)- | 126 | APELLGGPSVFLFPPKPKDTLMISRTPEVTCVVVDVSHEDPEVKFNWYVDGVEVHNAKTK |
| (G4S)2-GDF15 | | PREEQYNSTYRVVSVLTVLHQDWLNGKEYKCKVSNKALPAPIEKTISKAKGQPREPQVYT |
| | | LPPSRKEMTKNQVSLTCLVKGFYPSDIAVEWESNGQPENNYKTTPPVLKSDGSFFLYSKL |
| | | TVDKSRWQQGNVFSCSVMHEALHNHYTQKSLSLSPGGGGGSGGGGSARNGDHCPLGPGRC |
| | | CRLHTVRASLEDLGWADWVLSPREVQVTMCIGACPSQFRAANMHAQIKTSLHRLKPDTVP |
| | | APCCVPASYNPMVLIQKTDTGVSLQTYDDLLAKDCHCI |
| DhCpmFc(+)- | 127 | MEWSWVFLFFLSVTTGVHSAPELLGGPSVFLFPPKPKDTLMISRTPEVTCVVVDVSHEDP |
| (G4S)2-GDF15 | | EVKFNWYVDGVEVHNAKTKPREEQYNSTYRVVSVLTVLHQDWLNGKEYKCKVSNKALPAP |
| with a VH21 | | IEKTISKAKGQPREPQVYTLPPSRKEMTKNQVSLTCLVKGFYPSDIAVEWESNGQPENNY |
| signal | | KTTPPVLKSDGSFFLYSKLTVDKSRWQQGNVFSCSVMHEALHNHYTQKSLSLSPGGGGGS |
| sequence | | GGGGSARNGDHCPLGPGRCCRLHTVRASLEDLGWADWVLSPREVQVTMCIGACPSQFRAA |
| | | NMHAQIKTSLHRLKPDTVPAPCCVPASYNPMVLIQKTDTGVSLQTYDDLLAKDCHCI |
| DhCpmFc(+)- | 128 | APELLGGPSVFLFPPKPKDTLMISRTPEVTCVVVDVSHEDPEVKFNWYVDGVEVHNAKTK |
| (G4Q)2-GDF15 | | PREEQYNSTYRVVSVLTVLHQDWLNGKEYKCKVSNKALPAPIEKTISKAKGQPREPQVYT |
| | | LPPSRKEMTKNQVSLTCLVKGFYPSDIAVEWESNGQPENNYKTTPPVLKSDGSFFLYSKL |
| | | TVDKSRWQQGNVFSCSVMHEALHNHYTQKSLSLSPGGGGGQGGGGQGGGGQGGGGQARNG |
| | | DHCPLGPGRCCRLHTVRASLEDLGWADWVLSPREVQVTMCIGACPSQFRAANMHAQIKTS |
| | | LHRLKPDTVPAPCCVPASYNPMVLIQKTDTGVSLQTYDDLLAKDCHCI |
| DhCpmFc(+)- | 129 | MEWSWVFLFFLSVTTGVHSAPELLGGPSVFLFPPKPKDTLMISRTPEVTCVVVDVSHEDP |
| (G4Q)2-GDF15 | | EVKFNWYVDGVEVHNAKTKPREEQYNSTYRVVSVLTVLHQDWLNGKEYKCKVSNKALPAP |
| with a VH21 | | IEKTISKAKGQPREPQVYTLPPSRKEMTKNQVSLTCLVKGFYPSDIAVEWESNGQPENNY |
| signal | | KTTPPVLKSDGSFFLYSKLTVDKSRWQQGNVFSCSVMHEALHNHYTQKSLSLSPGGGGGQ |
| sequence | | GGGGQGGGGQGGGGQARNGDHCPLGPGRCCRLHTVRASLEDLGWADWVLSPREVQVTMCI |
| | | GACPSQFRAANMHAQIKTSLHRLKPDTVPAPCCVPASYNPMVLIQKTDTGVSLQTYDDLL |
| | | AKDCHCI |
| DhCpmFc(−) | 130 | APELLGGPSVFLFPPKPKDTLMISRTPEVTCVVVDVSHEDPEVKFNWYVDGVEVHNAKTK |
| (L351C) | | PREEQYNSTYRVVSVLTVLHQDWLNGKEYKCKVSNKALPAPIEKTISKAKGQPREPQVYT |
| | | CPPSREEMTKNQVSLTCLVKGFYPSDIAVEWESNGQPENNYDTTPPVLDSDGSFFLYSDL |
| | | TVDKSRWQQGNVFSCSVMHEALHNHYTQKSLSLSPGK |
| DhCpmFc(+)(L351C)- | 131 | APELLGGPSVFLFPPKPKDTLMISRTPEVTCVVVDVSHEDPEVKFNWYVDGVEVHNAKTK |
| G4- | | PREEQYNSTYRVVSVLTVLHQDWLNGKEYKCKVSNKALPAPIEKTISKAKGQPREPQVYT |
| GDF15 | | CPPSRKEMTKNQVSLTCLVKGFYPSDIAVEWESNGQPENNYKTTPPVLKSDGSFFLYSKL |
| | | TVDKSRWQQGNVFSCSVMHEALHNHYTQKSLSLSPGGGGGARNGDHCPLGPGRCCRLHTV |
| | | RASLEDLGWADWVLSPREVQVTMCIGACPSQFRAANMHAQIKTSLHRLKPDTVPAPCCVP |
| | | ASYNPMVLIQKTDTGVSLQTYDDLLAKDCHCI |
| DhCpmFc(−) | 132 | MEWSWVFLFFLSVTTGVHSAPELLGGPSVFLFPPKPKDTLMISRTPEVTCVVVDVSHEDP |
| (L351C) | | EVKFNWYVDGVEVHNAKTKPREEQYNSTYRVVSVLTVLHQDWLNGKEYKCKVSNKALPAP |
| with a VH21 | | IEKTISKAKGQPREPQVYTCPPSREEMTKNQVSLTCLVKGFYPSDIAVEWESNGQPENNY |
| signal | | DTTPPVLDSDGSFFLYSDLTVDKSRWQQGNVFSCSVMHEALHNHYTQKSLSLSPGK |
| sequence | | |
| DhCpmFc(+)(L351C)- | 133 | MEWSWVFLFFLSVTTGVHSAPELLGGPSVFLFPPKPKDTLMISRTPEVTCVVVDVSHEDP |
| G4- | | EVKFNWYVDGVEVHNAKTKPREEQYNSTYRVVSVLTVLHQDWLNGKEYKCKVSNKALPAP |
| GDF15 with a | | IEKTISKAKGQPREPQVYTCPPSRKEMTKNQVSLTCLVKGFYPSDIAVEWESNGQPENNY |
| VH21 signal | | KTTPPVLKSDGSFFLYSKLTVDKSRWQQGNVFSCSVMHEALHNHYTQKSLSLSPGGGGGA |
| sequence | | RNGDHCPLGPGRCCRLHTVRASLEDLGWADWVLSPREVQVTMCIGACPSQFRAANMHAQI |
| | | KTSLHRLKPDTVPAPCCVPASYNPMVLIQKTDTGVSLQTYDDLLAKDCHCI |
| DhCpmFc(−) | 134 | APELLGGPSVFLFPPKPKDTLMISRTPEVTCVVVDVSHEDPEVKFNWYVDGVEVHNAKTK |
| (Y349C) | | PREEQYNSTYRVVSVLTVLHQDWLNGKEYKCKVSNKALPAPIEKTISKAKGQPREPQVCT |
| | | LPPSREEMTKNQVSLTCLVKGFYPSDIAVEWESNGQPENNYDTTPPVLDSDGSFFLYSDL |
| | | TVDKSRWQQGNVFSCSVMHEALHNHYTQKSLSLSPGK |
| DhCpmFc(+)(S354C)- | 135 | APELLGGPSVFLFPPKPKDTLMISRTPEVTCVVVDVSHEDPEVKFNWYVDGVEVHNAKTK |
| G4- | | PREEQYNSTYRVVSVLTVLHQDWLNGKEYKCKVSNKALPAPIEKTISKAKGQPREPQVYT |
| GDF15 | | LPPCRKEMTKNQVSLTCLVKGFYPSDIAVEWESNGQPENNYKTTPPVLKSDGSFFLYSKL |
| | | TVDKSRWQQGNVFSCSVMHEALHNHYTQKSLSLSPGGGGGARNGDHCPLGPGRCCRLHTV |
| | | RASLEDLGWADWVLSPREVQVTMCIGACPSQFRAANMHAQIKTSLHRLKPDTVPAPCCVP |
| | | ASYNPMVLIQKTDTGVSLQTYDDLLAKDCHCI |
| DhCpmFc(−) | 136 | MEWSWVFLFFLSVTTGVHSAPELLGGPSVFLFPPKPKDTLMISRTPEVTCVVVDVSHEDP |
| (Y349C) | | EVKFNWYVDGVEVHNAKTKPREEQYNSTYRVVSVLTVLHQDWLNGKEYKCKVSNKALPAP |
| with a VH21 | | IEKTISKAKGQPREPQVCTLPPSREEMTKNQVSLTCLVKGFYPSDIAVEWESNGQPENNY |
| signal | | DTTPPVLDSDGSFFLYSDLTVDKSRWQQGNVFSCSVMHEALHNHYTQKSLSLSPGK |
| sequence | | |
| DhCpmFc(+)(S354C)- | 137 | MEWSWVFLFFLSVTTGVHSAPELLGGPSVFLFPPKPKDTLMISRTPEVTCVVVDVSHEDP |
| G4- | | EVKFNWYVDGVEVHNAKTKPREEQYNSTYRVVSVLTVLHQDWLNGKEYKCKVSNKALPAP |
| GDF15 with a | | IEKTISKAKGQPREPQVYTLPPCRKEMTKNQVSLTCLVKGFYPSDIAVEWESNGQPENNY |
| VH21 signal | | KTTPPVLKSDGSFFLYSKLTVDKSRWQQGNVFSCSVMHEALHNHYTQKSLSLSPGGGGGA |
| sequence | | RNGDHCPLGPGRCCRLHTVRASLEDLGWADWVLSPREVQVTMCIGACPSQFRAANMHAQI |
| | | KTSLHRLKPDTVPAPCCVPASYNPMVLIQKTDTGVSLQTYDDLLAKDCHCI |
| CpmFc(+) | 138 | DKTHTCPPCPAPELLGGPSVFLFPPKPKDTLMISRTPEVTCVVVDVSHEDPEVKFNWYVD |
| | | GVEVHNAKTKPREEQYNSTYRVVSVLTVLHQDWLNGKEYKCKVSNKALPAPIEKTISKAK |
| | | GQPREPQVYTLPPSRKEMTKNQVSLTCLVKGFYPSDIAVEWESNGQPENNYKTTPPVLKS |
| | | DGSFFLYSKLTVDKSRWQQGNVFSCSVMHEALHNHYTQKSLSLSPGK |
| CpmFc(−)- | 139 | DKTHTCPPCPAPELLGGPSVFLFPPKPKDTLMISRTPEVTCVVVDVSHEDPEVKFNWYVD |
| (G4S)4-GDF15 | | GVEVHNAKTKPREEQYNSTYRVVSVLTVLHQDWLNGKEYKCKVSNKALPAPIEKTISKAK |
| | | GQPREPQVYTLPPSREEMTKNQVSLTCLVKGFYPSDIAVEWESNGQPENNYDTTPPVLDS |
| | | DGSFFLYSDLTVDKSRWQQGNVFSCSVMHEALHNHYTQKSLSLSPGGGGGSGGGGSGGGG |
| | | SGGGGSARNGDHCPLGPGRCCRLHTVRASLEDLGWADWVLSPREVQVTMCIGACPSQFRA |
| | | ANMHAQIKTSLHRLKPDTVPAPCCVPASYNPMVLIQKTDTGVSLQTYDDLLAKDCHCI |
| CpmFc(+) | 140 | MEWSWVFLFFLSVTTGVHSDKTHTCPPCPAPELLGGPSVFLFPPKPKDTLMISRTPEVTC |
| with a VH21 | | VVVDVSHEDPEVKFNWYVDGVEVHNAKTKPREEQYNSTYRVVSVLTVLHQDWLNGKEYKC |
| signal | | KVSNKALPAPIEKTISKAKGQPREPQVYTLPPSRKEMTKNQVSLTCLVKGFYPSDIAVEW |
| sequence | | ESNGQPENNYKTTPPVLKSDGSFFLYSKLTVDKSRWQQGNVFSCSVMHEALHNHYTQKSL |
| | | SLSPGK |
| CpmFc(−)- | 141 | MEWSWVFLFFLSVTTGVHSDKTHTCPPCPAPELLGGPSVFLFPPKPKDTLMISRTPEVTC |
| (G4S)4-GDF15 | | VVVDVSHEDPEVKFNWYVDGVEVHNAKTKPREEQYNSTYRVVSVLTVLHQDWLNGKEYKC |
| with a VH21 | | KVSNKALPAPIEKTISKAKGQPREPQVYTLPPSREEMTKNQVSLTCLVKGFYPSDIAVEW |
| signal | | ESNGQPENNYDTTPPVLDSDGSFFLYSDLTVDKSRWQQGNVFSCSVMHEALHNHYTQKSL |
| sequence | | SLSPGGGGGSGGGGSGGGGSGGGGSARNGDHCPLGPGRCCRLHTVRASLEDLGWADWVLS |
| | | PREVQVTMCIGACPSQFRAANMHAQIKTSLHRLKPDTVPAPCCVPASYNPMVLIQKTDTG |
| | | VSLQTYDDLLAKDCHCI |
| Fc-(G4S)8- | 142 | GGGERKSSVECPPCPAPPVAGPSVFLFPPKPKDTLMISRTPEVTCVVVDVSHEDPEVQFN |
| Fc-GS(G4S)4- | | WYVDGVEVHNAKTKPREEQFNSTFRVVSVLTVVHQDWLNGKEYKCKVSNKGLPAPIEKTI |
| GDF15 | | SKTKGQPREPQVYTLPPSREEMTKNQVSLTCLVKGFYPSDIAVEWESNGQPENNYKTTPP |
| | | MLDSDGSFFLYSKLTVDKSRWQQGNVFSCSVMHEALHNHYTQKSLSLSPGGGGGSGGGGS |
| | | GGGGSGGGGSGGGGSGGGGSGGGGSGGGGSERKSSVECPPCPAPPVAGPSVFLFPPKPKD |
| | | TLMISRTPEVTCVVVDVSHEDPEVQFNWYVDGVEVHNAKTKPREEQFNSTFRVVSVLTVV |
| | | HQDWLNGKEYKCKVSNKGLPAPIEKTISKTKGQPREPQVYTLPPSREEMTKNQVSLTCLV |
| | | KGFYPSDIAVEWESNGQPENNYKTTPPMLDSDGSFFLYSKLTVDKSRWQQGNVFSCSVMH |
| | | EALHNHYTQKSLSLSPGSGGGGSGGGGSGGGGSGGGGSARNGDHCPLGPGRCCRLHTVRA |
| | | SLEDLGWADWVLSPREVQVTMCIGACPSQFRAANMHAQIKTSLHRLKPDTVPAPCCVPAS |
| | | YNPMVLIQKTDTGVSLQTYDDLLAKDCHCI |
| Fc-(G4S)8- | 143 | MEWSWVFLFFLSVTTGVHSGGGERKSSVECPPCPAPPVAGPSVFLFPPKPKDTLMISRTP |
| Fc-GS(G4S)4- | | EVTCVVVDVSHEDPEVQFNWYVDGVEVHNAKTKPREEQFNSTFRVVSVLTVVHQDWLNGK |
| GDF15 with a | | EYKCKVSNKGLPAPIEKTISKTKGQPREPQVYTLPPSREEMTKNQVSLTCLVKGFYPSDI |
| VH21 signal | | AVEWESNGQPENNYKTTPPMLDSDGSFFLYSKLTVDKSRWQQGNVFSCSVMHEALHNHYT |
| sequence | | QKSLSLSPGGGGGSGGGGSGGGGSGGGGSGGGGSGGGGSGGGGSGGGGSERKSSVECPPC |
| | | PAPPVAGPSVFLFPPKPKDTLMISRTPEVTCVVVDVSHEDPEVQFNWYVDGVEVHNAKTK |
| | | PREEQFNSTFRVVSVLTVVHQDWLNGKEYKCKVSNKGLPAPIEKTISKTKGQPREPQVYT |
| | | LPPSREEMTKNQVSLTCLVKGFYPSDIAVEWESNGQPENNYKTTPPMLDSDGSFFLYSKL |
| | | TVDKSRWQQGNVFSCSVMHEALHNHYTQKSLSLSPGSGGGGSGGGGSGGGGSGGGGSARN |
| | | GDHCPLGPGRCCRLHTVRASLEDLGWADWVLSPREVQVTMCIGACPSQFRAANMHAQIKT |
| | | SLHRLKPDTVPAPCCVPASYNPMVLIQKTDTGVSLQTYDDLLAKDCHCI |
| Fc-(G4S)3- | 144 | GGGERKSSVECPPCPAPPVAGPSVFLFPPKPKDTLMISRTPEVTCVVVDVSHEDPEVQFN |
| Fc-GS(G4S)4- | | WYVDGVEVHNAKTKPREEQFNSTFRVVSVLTVVHQDWLNGKEYKCKVSNKGLPAPIEKTI |
| GDF15 | | SKTKGQPREPQVYTLPPSREEMTKNQVSLTCLVKGFYPSDIAVEWESNGQPENNYKTTPP |
| | | MLDSDGSFFLYSKLTVDKSRWQQGNVFSCSVMHEALHNHYTQKSLSLSPGGGGGSGGGGS |
| | | GGGGSERKSSVECPPCPAPPVAGPSVFLFPPKPKDTLMISRTPEVTCVVVDVSHEDPEVQ |
| | | FNWYVDGVEVHNAKTKPREEQFNSTFRVVSVLTVVHQDWLNGKEYKCKVSNKGLPAPIEK |
| | | TISKTKGQPREPQVYTLPPSREEMTKNQVSLTCLVKGFYPSDIAVEWESNGQPENNYKTT |
| | | PPMLDSDGSFFLYSKLTVDKSRWQQGNVFSCSVMHEALHNHYTQKSLSLSPGSGGGGSGG |
| | | GGSGGGGSGGGGSARNGDHCPLGPGRCCRLHTVRASLEDLGWADWVLSPREVQVTMCIGA |
| | | CPSQFRAANMHAQIKTSLHRLKPDTVPAPCCVPASYNPMVLIQKTDTGVSLQTYDDLLAK |
| | | DCHCI |
| Fc-(G4S)3- | 145 | MEWSWVFLFFLSVTTGVHSGGGERKSSVECPPCPAPPVAGPSVFLFPPKPKDTLMISRTP |
| Fc-GS(G4S)4- | | EVTCVVVDVSHEDPEVQFNWYVDGVEVHNAKTKPREEQFNSTFRVVSVLTVVHQDWLNGK |
| GDF15 with a | | EYKCKVSNKGLPAPIEKTISKTKGQPREPQVYTLPPSREEMTKNQVSLTCLVKGFYPSDI |
| VH21 signal | | AVEWESNGQPENNYKTTPPMLDSDGSFFLYSKLTVDKSRWQQGNVFSCSVMHEALHNHYT |
| sequence | | QKSLSLSPGGGGGSGGGGSGGGGSERKSSVECPPCPAPPVAGPSVFLFPPKPKDTLMISR |
| | | TPEVTCVVVDVSHEDPEVQFNWYVDGVEVHNAKTKPREEQFNSTFRVVSVLTVVHQDWLN |
| | | GKEYKCKVSNKGLPAPIEKTISKTKGQPREPQVYTLPPSREEMTKNQVSLTCLVKGFYPS |
| | | DIAVEWESNGQPENNYKTTPPMLDSDGSFFLYSKLTVDKSRWQQGNVFSCSVMHEALHNH |
| | | YTQKSLSLSPGSGGGGSGGGGSGGGGSGGGGSARNGDHCPLGPGRCCRLHTVRASLEDLG |
| | | WADWVLSPREVQVTMCIGACPSQFRAANMHAQIKTSLHRLKPDTVPAPCCVPASYNPMVL |
| | | IQKTDTGVSLQTYDDLLAKDCHCI |
| Fc-(G4S)5- | 146 | GGGERKSSVECPPCPAPPVAGPSVFLFPPKPKDTLMISRTPEVTCVVVDVSHEDPEVQFN |
| Fc-GS(G4S)4- | | WYVDGVEVHNAKTKPREEQFNSTFRVVSVLTVVHQDWLNGKEYKCKVSNKGLPAPIEKTI |
| GDF15 | | SKTKGQPREPQVYTLPPSREEMTKNQVSLTCLVKGFYPSDIAVEWESNGQPENNYKTTPP |
| | | MLDSDGSFFLYSKLTVDKSRWQQGNVFSCSVMHEALHNHYTQKSLSLSPGGGGGSGGGGS |
| | | GGGGSGGGGSGGGGSERKSSVECPPCPAPPVAGPSVFLFPPKPKDTLMISRTPEVTCVVV |
| | | DVSHEDPEVQFNWYVDGVEVHNAKTKPREEQFNSTFRVVSVLTVVHQDWLNGKEYKCKVS |
| | | NKGLPAPIEKTISKTKGQPREPQVYTLPPSREEMTKNQVSLTCLVKGFYPSDIAVEWESN |
| | | GQPENNYKTTPPMLDSDGSFFLYSKLTVDKSRWQQGNVFSCSVMHEALHNHYTQKSLSLS |
| | | PGSGGGGSGGGGSGGGGSGGGGSARNGDHCPLGPGRCCRLHTVRASLEDLGWADWVLSPR |
| | | EVQVTMCIGACPSQFRAANMHAQIKTSLHRLKPDTVPAPCCVPASYNPMVLIQKTDTGVS |
| | | LQTYDDLLAKDCHCI |
| Fc-(G4S)5- | 147 | MEWSWVFLFFLSVTTGVHSGGGERKSSVECPPCPAPPVAGPSVFLFPPKPKDTLMISRTP |
| Fc-GS(G4S)4- | | EVTCVVVDVSHEDPEVQFNWYVDGVEVHNAKTKPREEQFNSTFRVVSVLTVVHQDWLNGK |
| GDF15 with a | | EYKCKVSNKGLPAPIEKTISKTKGQPREPQVYTLPPSREEMTKNQVSLTCLVKGFYPSDI |
| VH21 signal | | AVEWESNGQPENNYKTTPPMLDSDGSFFLYSKLTVDKSRWQQGNVFSCSVMHEALHNHYT |
| sequence | | QKSLSLSPGGGGGSGGGGSGGGGSGGGGSGGGGSERKSSVECPPCPAPPVAGPSVFLFPP |
| | | KPKDTLMISRTPEVTCVVVDVSHEDPEVQFNWYVDGVEVHNAKTKPREEQFNSTFRVVSV |
| | | LTVVHQDWLNGKEYKCKVSNKGLPAPIEKTISKTKGQPREPQVYTLPPSREEMTKNQVSL |
| | | TCLVKGFYPSDIAVEWESNGQPENNYKTTPPMLDSDGSFFLYSKLTVDKSRWQQGNVFSC |
| | | SVMHEALHNHYTQKSLSLSPGSGGGGSGGGGSGGGGSGGGGSARNGDHCPLGPGRCCRLH |
| | | TVRASLEDLGWADWVLSPREVQVTMCIGACPSQFRAANMHAQIKTSLHRLKPDTVPAPCC |
| | | VPASYNPMVLIQKTDTGVSLQTYDDLLAKDCHCI |
| Mature human | 148 | ARDGDHCPLGPGRCCRLHTVRASLEDLGWADWVLSPREVQVTMCIGACPSQFRAANMHAQ |
| GDF15(N3D) | | IKTSLHRLKPDTVPAPCCVPASYNPMVLIQKTDTGVSLQTYDDLLAKDCHCI |
| Mature human | 149 | GDHCPLGPGRCCRLHTVRASLEDLGWADWVLSPREVQVTMCIGACPSQFRAANMHAQIKT |
| GDF15(Ndel3) | | SLHRLKPDTVPAPCCVPASYNPMVLIQKTDTGVSLQTYDDLLAKDCHCI |
| Sequence for | 150 | APELLGGPSVFLFPPKPKDTLMISRTPEVTCVVVDVSHEDPEVKFNWYVDGVEVHNAKTK |
| dimer of | | PREEQYNSTYRVVSVLTVLHQDWLNGKEYKCKVSNKALPAPIEKTISKAKGQPREPQVTT |
| DhMonoFc- | | LPPSREEMTKNQVSLTCLVKGFYPSDIAVEWESNGQPENNYDTTPPVLDSDGSFFLYSDL |
| GDF15 | | TVDKSRWQQGNVFSCSVMHEALHNHYTQKSLSLSPGARNGDHCPLGPGRCCRLHTVRASL |
| | | EDLGWADWVLSPREVQVTMCIGACPSQFRAANMHAQIKTSLHRLKPDTVPAPCCVPASYN |
| | | PMVLIQKTDTGVSLQTYDDLLAKDCHCI |
| Sequence for | 151 | APELLGGPSVFLFPPKPKDTLMISRTPEVTCVVVDVSHEDPEVKFNWYVDGVEVHNAKTK |
| dimer of | | PREEQYNSTYRVVSVLTVLHQDWLNGKEYKCKVSNKALPAPIEKTISKAKGQPREPQVTT |
| DhMonoFc- | | LPPSREEMTKNQVSLTCLVKGFYPSDIAVEWESNGQPENNYDTTPPVLDSDGSFFLYSDL |
| (G4S)4-GDF15 | | TVDKSRWQQGNVFSCSVMHEALHNHYTQKSLSLSPGGGGGSGGGGSGGGGSGGGGSARNG |
| | | DHCPLGPGRCCRLHTVRASLEDLGWADWVLSPREVQVTMCIGACPSQFRAANMHAQIKTS |
| | | LHRLKPDTVPAPCCVPASYNPMVLIQKTDTGVSLQTYDDLLAKDCHCI |
| Sequence for | 152 | APELLGGPSVFLFPPKPKDTLMISRTPEVTCVVVDVSHEDPEVKFNWYVDGVEVHNAKTK |
| dimer of | | PREEQYNSTYRVVSVLTVLHQDWLNGKEYKCKVSNKALPAPIEKTISKAKGQPREPQVTT |
| DhMonoFc- | | LPPSREEMTKNQVSLTCLVKGFYPSDIAVEWESNGQPENNYDTTPPVLDSDGSFFLYSDL |
| (G4S)4- | | TVDKSRWQQGNVFSCSVMHEALHNHYTQKSLSLSPGGGGGSGGGGSGGGGSGGGGSARNG |
| GDF15(H6D) | | DDCPLGPGRCCRLHTVRASLEDLGWADWVLSPREVQVTMCIGACPSQFRAANMHAQIKTS |
| | | LHRLKPDTVPAPCCVPASYNPMVLIQKTDTGVSLQTYDDLLAKDCHCI |
| Sequence for | 153 | GGGERKSSVECPPCPAPPVAGPSVFLFPPKPKDTLMISRTPEVTCVVVDVSHEDPEVQFN |
| dimer of | | WYVDGVEVHNAKTKPREEQFNSTFRVVSVLTVVHQDWLNGKEYKCKVSNKGLPAPIEKTI |
| GGGFc- | | SKTKGQPREPQVYTLPPSREEMTKNQVSLTCLVKGFYPSDIAVEWESNGQPENNYKTTPP |
| (G4S)4-Fc- | | MLDSDGSFFLYSKLTVDKSRWQQGNVFSCSVMHEALHNHYTQKSLSLSPGGGGGSGGGGS |
| S(G4S)4- | | GGGGSGGGGSERKSSVECPPCPAPPVAGPSVFLFPPKPKDTLMISRTPEVTCVVVDVSHE |
| GDF15 | | DPEVQFNWYVDGVEVHNAKTKPREEQFNSTFRVVSVLTVVHQDWLNGKEYKCKVSNKGLP |
| | | APIEKTISKTKGQPREPQVYTLPPSREEMTKNQVSLTCLVKGFYPSDIAVEWESNGQPEN |
| | | NYKTTPPMLDSDGSFFLYSKLTVDKSRWQQGNVFSCSVMHEALHNHYTQKSLSLSPGSGG |
| | | GGSGGGGSGGGGSGGGGSARNGDHCPLGPGRCCRLHTVRASLEDLGWADWVLSPREVQVT |
| | | MCIGACPSQFRAANMHAQIKTSLHRLKPDTVPAPCCVPASYNPMVLIQKTDTGVSLQTYD |
| | | DLLAKDCHCI |
| Sequence for | 154 | GGGAPPVAGPSVFLFPPKPKDTLMISRTPEVTCVVVDVSHEDPEVQFNWYVDGVEVHNAK |
| dimer of | | TKPREEQFNSTFRVVSVLTVVHQDWLNGKEYKCKVSNKGLPAPIEKTISKTKGQPREPQV |
| GGGDhFc- | | YTLPPSREEMTKNQVSLTCLVKGFYPSDIAVEWESNGQPENNYKTTPPMLDSDGSFFLYS |
| (G4S)-5- | | KLTVDKSRWQQGNVFSCSVMHEALHNHYTQKSLSLSPGGGGGSGGGGSGGGGSGGGGSGG |
| DhFc- | | GGSAPPVAGPSVFLFPPKPKDTLMISRTPEVTCVVVDVSHEDPEVQFNWYVDGVEVHNAK |
| S(G4S)4- | | TKPREEQFNSTFRVVSVLTVVHQDWLNGKEYKCKVSNKGLPAPIEKTISKTKGQPREPQV |
| GDF15 | | YTLPPSREEMTKNQVSLTCLVKGFYPSDIAVEWESNGQPENNYKTTPPMLDSDGSFFLYS |
| | | KLTVDKSRWQQGNVFSCSVMHEALHNHYTQKSLSLSPGSGGGGSGGGGSGGGGSGGGGSA |
| | | RNGDHCPLGPGRCCRLHTVRASLEDLGWADWVLSPREVQVTMCIGACPSQFRAANMHAQI |
| | | KTSLHRLKPDTVPAPCCVPASYNPMVLIQKTDTGVSLQTYDDLLAKDCHCI |
| DhholeFc | 155 | APELLGGPSVFLFPPKPKDTLMISRTPEVTCVVVDVSHEDPEVKFNWYVDGVEVHNAKTK |
| | | PREEQYNSTYRVVSVLTVLHQDWLNGKEYKCKVSNKALPAPIEKTISKAKGQPREPQVYT |
| | | LPPSRDELTKNQVSLSCAVKGFYPSDIAVEWESNGQPENNYKTTPPVLDSDGSFFLVSKL |
| | | TVDKSRWQQGNVFSCSVMHEALHNHYTQKSLSLSPGK |
| DhknobFc- | 156 | APELLGGPSVFLFPPKPKDTLMISRTPEVTCVVVDVSHEDPEVKFNWYVDGVEVHNAKTK |
| (G4S)4-GDF15 | | PREEQYNSTYRVVSVLTVLHQDWLNGKEYKCKVSNKALPAPIEKTISKAKGQPREPQVYT |
| | | LPPSRDELTKNQVSLWCLVKGFYPSDIAVEWESNGQPENNYKTTPPVLDSDGSFFLYSKL |
| | | TVDKSRWQQGNVFSCSVMHEALHNHYTQKSLSLSPGGGGGSGGGGSGGGGSGGGGSARNG |
| | | DHCPLGPGRCCRLHTVRASLEDLGWADWVLSPREVQVTMCIGACPSQFRAANMHAQIKTS |
| | | LHRLKPDTVPAPCCVPASYNPMVLIQKTDTGVSLQTYDDLLAKDCHCI |
| DhknobFc | 157 | APELLGGPSVFLFPPKPKDTLMISRTPEVTCVVVDVSHEDPEVKFNWYVDGVEVHNAKTK |
| | | PREEQYNSTYRVVSVLTVLHQDWLNGKEYKCKVSNKALPAPIEKTISKAKGQPREPQVYT |
| | | LPPSRDELTKNQVSLWCLVKGFYPSDIAVEWESNGQPENNYKTTPPVLDSDGSFFLYSKL |
| | | TVDKSRWQQGNVFSCSVMHEALHNHYTQKSLSLSPG |
| DhholeFc | 158 | APELLGGPSVFLFPPKPKDTLMISRTPEVTCVVVDVSHEDPEVKFNWYVDGVEVHNAKTK |
| | | PREEQYNSTYRVVSVLTVLHQDWLNGKEYKCKVSNKALPAPIEKTISKAKGQPREPQVYT |
| | | LPPSRDELTKNQVSLSCAVKGFYPSDIAVEWESNGQPENNYKTTPPVLDSDGSFFLVSKL |
| | | TVDKSRWQQGNVFSCSVMHEALHNHYTQKSLSLSPG |
| DhCpmFc(−) | 159 | APELLGGPSVFLFPPKPKDTLMISRTPEVTCVVVDVSHEDPEVKFNWYVDGVEVHNAKTK |
| | | PREEQYNSTYRVVSVLTVLHQDWLNGKEYKCKVSNKALPAPIEKTISKAKGQPREPQVYT |
| | | LPPSREEMTKNQVSLTCLVKGFYPSDIAVEWESNGQPENNYDTTPPVLDSDGSFFLYSDL |
| | | TVDKSRWQQGNVFSCSVMHEALHNHYTQKSLSLSPGK |
| DhCpmFc(+)- | 160 | APELLGGPSVFLFPPKPKDTLMISRTPEVTCVVVDVSHEDPEVKFNWYVDGVEVHNAKTK |
| (1K)-GDF15 | | PREEQYNSTYRVVSVLTVLHQDWLNGKEYKCKVSNKALPAPIEKTISKAKGQPREPQVYT |
| | | LPPSRKEMTKNQVSLTCLVKGFYPSDIAVEWESNGQPENNYKTTPPVLKSDGSFFLYSKL |
| | | TVDKSRWQQGNVFSCSVMHEALHNHYTQKSLSLSPGGSGSATGGSGSVASSGSGSATHLA |
| | | RNGDHCPLGPGRCCRLHTVRASLEDLGWADWVLSPREVQVTMCIGACPSQFRAANMHAQI |
| | | KTSLHRLKPDTVPAPCCVPASYNPMVLIQKTDTGVSLQTYDDLLAKDCHCI |
| DhCpmFc(+) | 161 | APELLGGPSVFLFPPKPKDTLMISRTPEVTCVVVDVSHEDPEVKFNWYVDGVEVHNAKTK |
| | | PREEQYNSTYRVVSVLTVLHQDWLNGKEYKCKVSNKALPAPIEKTISKAKGQPREPQVYT |
| | | LPPSRKEMTKNQVSLTCLVKGFYPSDIAVEWESNGQPENNYKTTPPVLKSDGSFFLYSKL |
| | | TVDKSRWQQGNVFSCSVMHEALHNHYTQKSLSLSPG |
| DhCpmFc(−) | 162 | APELLGGPSVFLFPPKPKDTLMISRTPEVTCVVVDVSHEDPEVKFNWYVDGVEVHNAKTK |
| | | PREEQYNSTYRVVSVLTVLHQDWLNGKEYKCKVSNKALPAPIEKTISKAKGQPREPQVYT |
| | | LPPSREEMTKNQVSLTCLVKGFYPSDIAVEWESNGQPENNYDTTPPVLDSDGSFFLYSDL |
| | | TVDKSRWQQGNVFSCSVMHEALHNHYTQKSLSLSPG |
| DhCpmFc(+) | 163 | APELLGGPSVFLFPPKPKDTLMISRTPEVTCVVVDVSHEDPEVKFNWYVDGVEVHNAKTK |
| | | PREEQYNSTYRVVSVLTVLHQDWLNGKEYKCKVSNKALPAPIEKTISKAKGQPREPQVYT |
| | | LPPSRKEMTKNQVSLTCLVKGFYPSDIAVEWESNGQPENNYKTTPPVLKSDGSFFLYSKL |
| | | TVDKSRWQQGNVFSCSVMHEALHNHYTQKSLSLSPGK |
| DhCpmFc(−)- | 164 | APELLGGPSVFLFPPKPKDTLMISRTPEVTCVVVDVSHEDPEVKFNWYVDGVEVHNAKTK |
| GDF15 | | PREEQYNSTYRVVSVLTVLHQDWLNGKEYKCKVSNKALPAPIEKTISKAKGQPREPQVYT |
| | | LPPSREEMTKNQVSLTCLVKGFYPSDIAVEWESNGQPENNYDTTPPVLDSDGSFFLYSDL |
| | | TVDKSRWQQGNVFSCSVMHEALHNHYTQKSLSLSPGARNGDHCPLGPGRCCRLHTVRASL |
| | | EDLGWADWVLSPREVQVTMCIGACPSQFRAANMHAQIKTSLHRLKPDTVPAPCCVPASYN |
| | | PMVLIQKTDTGVSLQTYDDLLAKDCHCI |
| DhCpmFc(−) | 165 | APELLGGPSVFLFPPKPKDTLMISRTPEVTCVVVDVSHEDPEVKFNWYVDGVEVHNAKTK |
| | | PREEQYNSTYRVVSVLTVLHQDWLNGKEYKCKVSNKALPAPIEKTISKAKGQPREPQVYT |
| | | LPPSREEMTKNQVSLTCLVKGFYPSDIAVEWESNGQPENNYDTTPPVLDSDGSFFLYSDL |
| | | TVDKSRWQQGNVFSCSVMHEALHNHYTQKSLSLSPG |
| DhCpmFc(+) | 166 | APELLGGPSVFLFPPKPKDTLMISRTPEVTCVVVDVSHEDPEVKFNWYVDGVEVHNAKTK |
| | | PREEQYNSTYRVVSVLTVLHQDWLNGKEYKCKVSNKALPAPIEKTISKAKGQPREPQVYT |
| | | LPPSRKEMTKNQVSLTCLVKGFYPSDIAVEWESNGQPENNYKTTPPVLKSDGSFFLYSKL |
| | | TVDKSRWQQGNVFSCSVMHEALHNHYTQKSLSLSPG |
| DhCpmFc(−)- | 167 | APELLGGPSVFLFPPKPKDTLMISRTPEVTCVVVDVSHEDPEVKFNWYVDGVEVHNAKTK |
| GDF15(N3D) | | PREEQYNSTYRVVSVLTVLHQDWLNGKEYKCKVSNKALPAPIEKTISKAKGQPREPQVYT |
| | | LPPSREEMTKNQVSLTCLVKGFYPSDIAVEWESNGQPENNYDTTPPVLDSDGSFFLYSDL |
| | | TVDKSRWQQGNVFSCSVMHEALHNHYTQKSLSLSPGARDGDHCPLGPGRCCRLHTVRASL |
| | | EDLGWADWVLSPREVQVTMCIGACPSQFRAANMHAQIKTSLHRLKPDTVPAPCCVPASYN |
| | | PMVLIQKTDTGVSLQTYDDLLAKDCHCI |
| DhCpmFc(−)- | 168 | APELLGGPSVFLFPPKPKDTLMISRTPEVTCVVVDVSHEDPEVKFNWYVDGVEVHNAKTK |
| GDF15(Nde13) | | PREEQYNSTYRVVSVLTVLHQDWLNGKEYKCKVSNKALPAPIEKTISKAKGQPREPQVYT |
| | | LPPSREEMTKNQVSLTCLVKGFYPSDIAVEWESNGQPENNYDTTPPVLDSDGSFFLYSDL |
| | | TVDKSRWQQGNVFSCSVMHEALHNHYTQKSLSLSPGGDHCPLGPGRCCRLHTVRASLEDL |
| | | GWADWVLSPREVQVTMCIGACPSQFRAANMHAQIKTSLHRLKPDTVPAPCCVPASYNPMV |
| | | LIQKTDTGVSLQTYDDLLAKDCHCI |
| DhCpmFc(−)- | 169 | APELLGGPSVFLFPPKPKDTLMISRTPEVTCVVVDVSHEDPEVKFNWYVDGVEVHNAKTK |
| G4- | | PREEQYNSTYRVVSVLTVLHQDWLNGKEYKCKVSNKALPAPIEKTISKAKGQPREPQVYT |
| GDF15(N3D) | | LPPSREEMTKNQVSLTCLVKGFYPSDIAVEWESNGQPENNYDTTPPVLDSDGSFFLYSDL |
| | | TVDKSRWQQGNVFSCSVMHEALHNHYTQKSLSLSPGGGGGARDGDHCPLGPGRCCRLHTV |
| | | RASLEDLGWADWVLSPREVQVTMCIGACPSQFRAANMHAQIKTSLHRLKPDTVPAPCCVP |
| | | ASYNPMVLIQKTDTGVSLQTYDDLLAKDCHCI |
| DhCpmFc(−)- | 170 | APELLGGPSVFLFPPKPKDTLMISRTPEVTCVVVDVSHEDPEVKFNWYVDGVEVHNAKTK |
| G4S-GDF15 | | PREEQYNSTYRVVSVLTVLHQDWLNGKEYKCKVSNKALPAPIEKTISKAKGQPREPQVYT |
| | | LPPSREEMTKNQVSLTCLVKGFYPSDIAVEWESNGQPENNYDTTPPVLDSDGSFFLYSDL |
| | | TVDKSRWQQGNVFSCSVMHEALHNHYTQKSLSLSPGGGGGSARNGDHCPLGPGRCCRLHT |
| | | VRASLEDLGWADWVLSPREVQVTMCIGACPSQFRAANMHAQIKTSLHRLKPDTVPAPCCV |
| | | PASYNPMVLIQKTDTGVSLQTYDDLLAKDCHCI |
| DhCpmFc(−)- | 171 | APELLGGPSVFLFPPKPKDTLMISRTPEVTCVVVDVSHEDPEVKFNWYVDGVEVHNAKTK |
| (G4S)2-GDF15 | | PREEQYNSTYRVVSVLTVLHQDWLNGKEYKCKVSNKALPAPIEKTISKAKGQPREPQVYT |
| | | LPPSREEMTKNQVSLTCLVKGFYPSDIAVEWESNGQPENNYDTTPPVLDSDGSFFLYSDL |
| | | TVDKSRWQQGNVFSCSVMHEALHNHYTQKSLSLSPGGGGGSGGGGSARNGDHCPLGPGRC |
| | | CRLHTVRASLEDLGWADWVLSPREVQVTMCIGACPSQFRAANMHAQIKTSLHRLKPDTVP |
| | | APCCVPASYNPMVLIQKTDTGVSLQTYDDLLAKDCHCI |
| DhCpmFc(−)- | 172 | APELLGGPSVFLFPPKPKDTLMISRTPEVTCVVVDVSHEDPEVKFNWYVDGVEVHNAKTK |
| (G4S)2- | | PREEQYNSTYRVVSVLTVLHQDWLNGKEYKCKVSNKALPAPIEKTISKAKGQPREPQVYT |
| GDF15(N3D) | | LPPSREEMTKNQVSLTCLVKGFYPSDIAVEWESNGQPENNYDTTPPVLDSDGSFFLYSDL |
| | | TVDKSRWQQGNVFSCSVMHEALHNHYTQKSLSLSPGGGGGSGGGGSARDGDHCPLGPGRC |
| | | CRLHTVRASLEDLGWADWVLSPREVQVTMCIGACPSQFRAANMHAQIKTSLHRLKPDTVP |
| | | APCCVPASYNPMVLIQKTDTGVSLQTYDDLLAKDCHCI |
| DhCpmFc(−)- | 173 | APELLGGPSVFLFPPKPKDTLMISRTPEVTCVVVDVSHEDPEVKFNWYVDGVEVHNAKTK |
| G4P-GDF15 | | PREEQYNSTYRVVSVLTVLHQDWLNGKEYKCKVSNKALPAPIEKTISKAKGQPREPQVYT |
| | | LPPSREEMTKNQVSLTCLVKGFYPSDIAVEWESNGQPENNYDTTPPVLDSDGSFFLYSDL |
| | | TVDKSRWQQGNVFSCSVMHEALHNHYTQKSLSLSPGGGGGPARNGDHCPLGPGRCCRLHT |
| | | VRASLEDLGWADWVLSPREVQVTMCIGACPSQFRAANMHAQIKTSLHRLKPDTVPAPCCV |
| | | PASYNPMVLIQKTDTGVSLQTYDDLLAKDCHCI |
| DhCpmFc(−)- | 174 | APELLGGPSVFLFPPKPKDTLMISRTPEVTCVVVDVSHEDPEVKFNWYVDGVEVHNAKTK |
| (G4P)2-GDF15 | | PREEQYNSTYRVVSVLTVLHQDWLNGKEYKCKVSNKALPAPIEKTISKAKGQPREPQVYT |
| | | LPPSREEMTKNQVSLTCLVKGFYPSDIAVEWESNGQPENNYDTTPPVLDSDGSFFLYSDL |
| | | TVDKSRWQQGNVFSCSVMHEALHNHYTQKSLSLSPGGGGGPGGGGPARNGDHCPLGPGRC |
| | | CRLHTVRASLEDLGWADWVLSPREVQVTMCIGACPSQFRAANMHAQIKTSLHRLKPDTVP |
| | | APCCVPASYNPMVLIQKTDTGVSLQTYDDLLAKDCHCI |
| DhCpmFc(−)- | 175 | APELLGGPSVFLFPPKPKDTLMISRTPEVTCVVVDVSHEDPEVKFNWYVDGVEVHNAKTK |
| G4Q-GDF15 | | PREEQYNSTYRVVSVLTVLHQDWLNGKEYKCKVSNKALPAPIEKTISKAKGQPREPQVYT |
| | | LPPSREEMTKNQVSLTCLVKGFYPSDIAVEWESNGQPENNYDTTPPVLDSDGSFFLYSDL |
| | | TVDKSRWQQGNVFSCSVMHEALHNHYTQKSLSLSPGGGGGQARNGDHCPLGPGRCCRLHT |
| | | VRASLEDLGWADWVLSPREVQVTMCIGACPSQFRAANMHAQIKTSLHRLKPDTVPAPCCV |
| | | PASYNPMVLIQKTDTGVSLQTYDDLLAKDCHCI |
| DhCpmFc(−)- | 176 | APELLGGPSVFLFPPKPKDTLMISRTPEVTCVVVDVSHEDPEVKFNWYVDGVEVHNAKTK |
| (G4Q)2-GDF15 | | PREEQYNSTYRVVSVLTVLHQDWLNGKEYKCKVSNKALPAPIEKTISKAKGQPREPQVYT |
| | | LPPSREEMTKNQVSLTCLVKGFYPSDIAVEWESNGQPENNYDTTPPVLDSDGSFFLYSDL |
| | | TVDKSRWQQGNVFSCSVMHEALHNHYTQKSLSLSPGGGGGQGGGGQARNGDHCPLGPGRC |
| | | CRLHTVRASLEDLGWADWVLSPREVQVTMCIGACPSQFRAANMHAQIKTSLHRLKPDTVP |
| | | APCCVPASYNPMVLIQKTDTGVSLQTYDDLLAKDCHCI |
| DhCpmFc(−)- | 177 | APELLGGPSVFLFPPKPKDTLMISRTPEVTCVVVDVSHEDPEVKFNWYVDGVEVHNAKTK |
| (G4Q)2- | | PREEQYNSTYRVVSVLTVLHQDWLNGKEYKCKVSNKALPAPIEKTISKAKGQPREPQVYT |
| GDF15(ND3) | | LPPSREEMTKNQVSLTCLVKGFYPSDIAVEWESNGQPENNYDTTPPVLDSDGSFFLYSDL |
| | | TVDKSRWQQGNVFSCSVMHEALHNHYTQKSLSLSPGGGGGQGGGGQARDGDHCPLGPGRC |
| | | CRLHTVRASLEDLGWADWVLSPREVQVTMCIGACPSQFRAANMHAQIKTSLHRLKPDTVP |
| | | APCCVPASYNPMVLIQKTDTGVSLQTYDDLLAKDCHCI |
| DhCpmFc(−)- | 178 | APELLGGPSVFLFPPKPKDTLMISRTPEVTCVVVDVSHEDPEVKFNWYVDGVEVHNAKTK |
| (G4Q)2- | | PREEQYNSTYRVVSVLTVLHQDWLNGKEYKCKVSNKALPAPIEKTISKAKGQPREPQVYT |
| GDF15(Ndel3) | | LPPSREEMTKNQVSLTCLVKGFYPSDIAVEWESNGQPENNYDTTPPVLDSDGSFFLYSDL |
| | | TVDKSRWQQGNVFSCSVMHEALHNHYTQKSLSLSPGGGGGQGGGGQGDHCPLGPGRCCRL |
| | | HTVRASLEDLGWADWVLSPREVQVTMCIGACPSQFRAANMHAQIKTSLHRLKPDTVPAPC |
| | | CVPASYNPMVLIQKTDTGVSLQTYDDLLAKDCHCI |
| DhCpmFc(−) | 179 | APELLGGPSVFLFPPKPKDTLMISRTPEVTCVVVDVSHEDPEVKFNWYVDGVEVHNAKTK |
| (Y349C) | | PREEQYNSTYRVVSVLTVLHQDWLNGKEYKCKVSNKALPAPIEKTISKAKGQPREPQVCT |
| | | LPPSREEMTKNQVSLTCLVKGFYPSDIAVEWESNGQPENNYDTTPPVLDSDGSFFLYSDL |
| | | TVDKSRWQQGNVFSCSVMHEALHNHYTQKSLSLSPGK |
| DhCpmFc(+)(S354C)- | 180 | APELLGGPSVFLFPPKPKDTLMISRTPEVTCVVVDVSHEDPEVKFNWYVDGVEVHNAKTK |
| GDF15(N3D) | | PREEQYNSTYRVVSVLTVLHQDWLNGKEYKCKVSNKALPAPIEKTISKAKGQPREPQVYT |
| | | LPPCRKEMTKNQVSLTCLVKGFYPSDIAVEWESNGQPENNYKTTPPVLKSDGSFFLYSKL |
| | | TVDKSRWQQGNVFSCSVMHEALHNHYTQKSLSLSPGARDGDHCPLGPGRCCRLHTVRASL |
| | | EDLGWADWVLSPREVQVTMCIGACPSQFRAANMHAQIKTSLHRLKPDTVPAPCCVPASYN |
| | | PMVLIQKTDTGVSLQTYDDLLAKDCHCI |
| DhCpmFc(+)(S354C) | 181 | APELLGGPSVFLFPPKPKDTLMISRTPEVTCVVVDVSHEDPEVKFNWYVDGVEVHNAKTK |
| | | PREEQYNSTYRVVSVLTVLHQDWLNGKEYKCKVSNKALPAPIEKTISKAKGQPREPQVYT |
| | | LPPCRKEMTKNQVSLTCLVKGFYPSDIAVEWESNGQPENNYKTTPPVLKSDGSFFLYSKL |
| | | TVDKSRWQQGNVFSCSVMHEALHNHYTQKSLSLSPG |
| DhCpmFc(−) | 182 | APELLGGPSVFLFPPKPKDTLMISRTPEVTCVVVDVSHEDPEVKFNWYVDGVEVHNAKTK |
| (Y349C) | | PREEQYNSTYRVVSVLTVLHQDWLNGKEYKCKVSNKALPAPIEKTISKAKGQPREPQVCT |
| | | LPPSREEMTKNQVSLTCLVKGFYPSDIAVEWESNGQPENNYDTTPPVLDSDGSFFLYSDL |
| | | TVDKSRWQQGNVFSCSVMHEALHNHYTQKSLSLSPG |
| DhCpmFc(+)(S354C) | 183 | APELLGGPSVFLFPPKPKDTLMISRTPEVTCVVVDVSHEDPEVKFNWYVDGVEVHNAKTK |
| | | PREEQYNSTYRVVSVLTVLHQDWLNGKEYKCKVSNKALPAPIEKTISKAKGQPREPQVYT |
| | | LPPCRKEMTKNQVSLTCLVKGFYPSDIAVEWESNGQPENNYKTTPPVLKSDGSFFLYSKL |
| | | TVDKSRWQQGNVFSCSVMHEALHNHYTQKSLSLSPGK |
| DhCpmFc(−) | 184 | APELLGGPSVFLFPPKPKDTLMISRTPEVTCVVVDVSHEDPEVKFNWYVDGVEVHNAKTK |
| (Y349C)- | | PREEQYNSTYRVVSVLTVLHQDWLNGKEYKCKVSNKALPAPIEKTISKAKGQPREPQVCT |
| GDF15 | | LPPSREEMTKNQVSLTCLVKGFYPSDIAVEWESNGQPENNYDTTPPVLDSDGSFFLYSDL |
| | | TVDKSRWQQGNVFSCSVMHEALHNHYTQKSLSLSPGARNGDHCPLGPGRCCRLHTVRASL |
| | | EDLGWADWVLSPREVQVTMCIGACPSQFRAANMHAQIKTSLHRLKPDTVPAPCCVPASYN |
| | | PMVLIQKTDTGVSLQTYDDLLAKDCHCI |
| DhCpmFc(−) | 185 | APELLGGPSVFLFPPKPKDTLMISRTPEVTCVVVDVSHEDPEVKFNWYVDGVEVHNAKTK |
| (Y349C) | | PREEQYNSTYRVVSVLTVLHQDWLNGKEYKCKVSNKALPAPIEKTISKAKGQPREPQVCT |
| | | LPPSREEMTKNQVSLTCLVKGFYPSDIAVEWESNGQPENNYDTTPPVLDSDGSFFLYSDL |
| | | TVDKSRWQQGNVFSCSVMHEALHNHYTQKSLSLSPG |
| DhCpmFc(+)(S354C) | 186 | APELLGGPSVFLFPPKPKDTLMISRTPEVTCVVVDVSHEDPEVKFNWYVDGVEVHNAKTK |
| | | PREEQYNSTYRVVSVLTVLHQDWLNGKEYKCKVSNKALPAPIEKTISKAKGQPREPQVYT |
| | | LPPCRKEMTKNQVSLTCLVKGFYPSDIAVEWESNGQPENNYKTTPPVLKSDGSFFLYSKL |
| | | TVDKSRWQQGNVFSCSVMHEALHNHYTQKSLSLSPG |
| DhCpmFc(−) | 187 | APELLGGPSVFLFPPKPKDTLMISRTPEVTCVVVDVSHEDPEVKFNWYVDGVEVHNAKTK |
| (Y349C)- | | PREEQYNSTYRVVSVLTVLHQDWLNGKEYKCKVSNKALPAPIEKTISKAKGQPREPQVCT |
| GDF15(N3D) | | LPPSREEMTKNQVSLTCLVKGFYPSDIAVEWESNGQPENNYDTTPPVLDSDGSFFLYSDL |
| | | TVDKSRWQQGNVFSCSVMHEALHNHYTQKSLSLSPGARDGDHCPLGPGRCCRLHTVRASL |
| | | EDLGWADWVLSPREVQVTMCIGACPSQFRAANMHAQIKTSLHRLKPDTVPAPCCVPASYN |
| | | PMVLIQKTDTGVSLQTYDDLLAKDCHCI |
| DhCpmFc(−) | 188 | APELLGGPSVFLFPPKPKDTLMISRTPEVTCVVVDVSHEDPEVKFNWYVDGVEVHNAKTK |
| (Y349C)- | | PREEQYNSTYRVVSVLTVLHQDWLNGKEYKCKVSNKALPAPIEKTISKAKGQPREPQVCT |
| GDF15(Nde13) | | LPPSREEMTKNQVSLTCLVKGFYPSDIAVEWESNGQPENNYDTTPPVLDSDGSFFLYSDL |
| | | TVDKSRWQQGNVFSCSVMHEALHNHYTQKSLSLSPGGDHCPLGPGRCCRLHTVRASLEDL |
| | | GWADWVLSPREVQVTMCIGACPSQFRAANMHAQIKTSLHRLKPDTVPAPCCVPASYNPMV |
| | | LIQKTDTGVSLQTYDDLLAKDCHCI |
| DhCpmFc(−) | 189 | APELLGGPSVFLFPPKPKDTLMISRTPEVTCVVVDVSHEDPEVKFNWYVDGVEVHNAKTK |
| (Y349C)-G4- | | PREEQYNSTYRVVSVLTVLHQDWLNGKEYKCKVSNKALPAPIEKTISKAKGQPREPQVCT |
| GDF15(N3D) | | LPPSREEMTKNQVSLTCLVKGFYPSDIAVEWESNGQPENNYDTTPPVLDSDGSFFLYSDL |
| | | TVDKSRWQQGNVFSCSVMHEALHNHYTQKSLSLSPGGGGGARDGDHCPLGPGRCCRLHTV |
| | | RASLEDLGWADWVLSPREVQVTMCIGACPSQFRAANMHAQIKTSLHRLKPDTVPAPCCVP |
| | | ASYNPMVLIQKTDTGVSLQTYDDLLAKDCHCI |
| DhCpmFc(−) | 190 | APELLGGPSVFLFPPKPKDTLMISRTPEVTCVVVDVSHEDPEVKFNWYVDGVEVHNAKTK |
| (Y349C)- | | PREEQYNSTYRVVSVLTVLHQDWLNGKEYKCKVSNKALPAPIEKTISKAKGQPREPQVCT |
| (G4S)2- | | LPPSREEMTKNQVSLTCLVKGFYPSDIAVEWESNGQPENNYDTTPPVLDSDGSFFLYSDL |
| GDF15(N3D) | | TVDKSRWQQGNVFSCSVMHEALHNHYTQKSLSLSPGGGGGSGGGGSARDGDHCPLGPGRC |
| | | CRLHTVRASLEDLGWADWVLSPREVQVTMCIGACPSQFRAANMHAQIKTSLHRLKPDTVP |
| | | APCCVPASYNPMVLIQKTDTGVSLQTYDDLLAKDCHCI |
| DhCpmFc(−) | 191 | APELLGGPSVFLFPPKPKDTLMISRTPEVTCVVVDVSHEDPEVKFNWYVDGVEVHNAKTK |
| (Y349C)- | | PREEQYNSTYRVVSVLTVLHQDWLNGKEYKCKVSNKALPAPIEKTISKAKGQPREPQVCT |
| (G4Q)2- | | LPPSREEMTKNQVSLTCLVKGFYPSDIAVEWESNGQPENNYDTTPPVLDSDGSFFLYSDL |
| GDF15(N3D) | | TVDKSRWQQGNVFSCSVMHEALHNHYTQKSLSLSPGGGGGQGGGGQARDGDHCPLGPGRC |
| | | CRLHTVRASLEDLGWADWVLSPREVQVTMCIGACPSQFRAANMHAQIKTSLHRLKPDTVP |
| | | APCCVPASYNPMVLIQKTDTGVSLQTYDDLLAKDCHCI |
| DhCpmFc(+)(L351C) | 192 | APELLGGPSVFLFPPKPKDTLMISRTPEVTCVVVDVSHEDPEVKFNWYVDGVEVHNAKTK |
| | | PREEQYNSTYRVVSVLTVLHQDWLNGKEYKCKVSNKALPAPIEKTISKAKGQPREPQVYT |
| | | CPPSRKEMTKNQVSLTCLVKGFYPSDIAVEWESNGQPENNYKTTPPVLKSDGSFFLYSKL |
| | | TVDKSRWQQGNVFSCSVMHEALHNHYTQKSLSLSPGK |
| DhCpmFc(−) | 193 | APELLGGPSVFLFPPKPKDTLMISRTPEVTCVVVDVSHEDPEVKFNWYVDGVEVHNAKTK |
| (L351C)- | | PREEQYNSTYRVVSVLTVLHQDWLNGKEYKCKVSNKALPAPIEKTISKAKGQPREPQVYT |
| (G4S)2-GDF15 | | CPPSREEMTKNQVSLTCLVKGFYPSDIAVEWESNGQPENNYDTTPPVLDSDGSFFLYSDL |
| | | TVDKSRWQQGNVFSCSVMHEALHNHYTQKSLSLSPGGGGGSGGGGSARNGDHCPLGPGRC |
| | | CRLHTVRASLEDLGWADWVLSPREVQVTMCIGACPSQFRAANMHAQIKTSLHRLKPDTVP |
| | | APCCVPASYNPMVLIQKTDTGVSLQTYDDLLAKDCHCI |
| DhCpmFc(−) | 194 | APELLGGPSVFLFPPKPKDTLMISRTPEVTCVVVDVSHEDPEVKFNWYVDGVEVHNAKTK |
| (L351C) | | PREEQYNSTYRVVSVLTVLHQDWLNGKEYKCKVSNKALPAPIEKTISKAKGQPREPQVYT |
| | | CPPSREEMTKNQVSLTCLVKGFYPSDIAVEWESNGQPENNYDTTPPVLDSDGSFFLYSDL |
| | | TVDKSRWQQGNVFSCSVMHEALHNHYTQKSLSLSPG |
| DhCpmFc(+)(L351C) | 195 | APELLGGPSVFLFPPKPKDTLMISRTPEVTCVVVDVSHEDPEVKFNWYVDGVEVHNAKTK |
| | | PREEQYNSTYRVVSVLTVLHQDWLNGKEYKCKVSNKALPAPIEKTISKAKGQPREPQVYT |
| | | CPPSRKEMTKNQVSLTCLVKGFYPSDIAVEWESNGQPENNYKTTPPVLKSDGSFFLYSKL |
| | | TVDKSRWQQGNVFSCSVMHEALHNHYTQKSLSLSPG |
| HSA-(G4S)4- | 196 | DAHKSEVAHRFKDLGEENFKALVLIAFAQYLQQCPFEDHVKLVNEVTEFAKTCVADESAE |
| GDF15 | | NCDKSLHTLFGDKLCTVATLRETYGEMADCCAKQEPERNECFLQHKDDNPNLPRLVRPEV |
| | | DVMCTAFHDNEETFLKKYLYEIARRHPYFYAPELLFFAKRYKAAFTECCQAADKAACLLP |
| | | KLDELRDEGKASSAKQRLKCASLQKFGERAFKAWAVARLSQRFPKAEFAEVSKLVTDLTK |
| | | VHTECCHGDLLECADDRADLAKYICENQDSISSKLKECCEKPLLEKSHCIAEVENDEMPA |
| | | DLPSLAADFVESKDVCKNYAEAKDVFLGMFLYEYARRHPDYSVVLLLRLAKTYETTLEKC |
| | | CAAADPHECYAKVFDEFKPLVEEPQNLIKQNCELFEQLGEYKFQNALLVRYTKKVPQVST |
| | | PTLVEVSRNLGKVGSKCCKHPEAKRMPCAEDYLSVVLNQLCVLHEKTPVSDRVTKCCTES |
| | | LVNRRPCFSALEVDETYVPKEFNAETFTFHADICTLSEKERQIKKQTALVELVKHKPKAT |
| | | KEQLKAVMDDFAAFVEKCCKADDKETCFAEEGKKLVAASQAALGLGGGGSGGGGSGGGGS |
| | | GGGGSARNGDHCPLGPGRCCRLHTVRASLEDLGWADWVLSPREVQVTMCIGACPSQFRAA |
| | | NMHAQIKTSLHRLKPDTVPAPCCVPASYNPMVLIQKTDTGVSLQTYDDLLAKDCHCI |
| HSA- | 197 | DAHKSEVAHRFKDLGEENFKALVLIAFAQYLQQCPFEDHVKLVNEVTEFAKTCVADESAE |
| GSPAPAPGS- | | NCDKSLHTLFGDKLCTVATLRETYGEMADCCAKQEPERNECFLQHKDDNPNLPRLVRPEV |
| GDF15 | | DVMCTAFHDNEETFLKKYLYEIARRHPYFYAPELLFFAKRYKAAFTECCQAADKAACLLP |
| | | KLDELRDEGKASSAKQRLKCASLQKFGERAFKAWAVARLSQRFPKAEFAEVSKLVTDLTK |
| | | VHTECCHGDLLECADDRADLAKYICENQDSISSKLKECCEKPLLEKSHCIAEVENDEMPA |
| | | DLPSLAADFVESKDVCKNYAEAKDVFLGMFLYEYARRHPDYSVVLLLRLAKTYETTLEKC |
| | | CAAADPHECYAKVFDEFKPLVEEPQNLIKQNCELFEQLGEYKFQNALLVRYTKKVPQVST |
| | | PTLVEVSRNLGKVGSKCCKHPEAKRMPCAEDYLSVVLNQLCVLHEKTPVSDRVTKCCTES |
| | | LVNRRPCFSALEVDETYVPKEFNAETFTFHADICTLSEKERQIKKQTALVELVKHKPKAT |
| | | KEQLKAVMDDFAAFVEKCCKADDKETCFAEEGKKLVAASQAALGLGSPAPAPGSARNGDH |
| | | CPLGPGRCCRLHTVRASLEDLGWADWVLSPREVQVTMCIGACPSQFRAANMHAQIKTSLH |
| | | RLKPDTVPAPCCVPASYNPMVLIQKTDTGVSLQTYDDLLAKDCHCI |
| HSA- | 198 | DAHKSEVAHRFKDLGEENFKALVLIAFAQYLQQCPFEDHVKLVNEVTEFAKTCVADESAE |
| GS(PAPAP)2GS- | | NCDKSLHTLFGDKLCTVATLRETYGEMADCCAKQEPERNECFLQHKDDNPNLPRLVRPEV |
| GDF15 | | DVMCTAFHDNEETFLKKYLYEIARRHPYFYAPELLFFAKRYKAAFTECCQAADKAACLLP |
| | | KLDELRDEGKASSAKQRLKCASLQKFGERAFKAWAVARLSQRFPKAEFAEVSKLVTDLTK |
| | | VHTECCHGDLLECADDRADLAKYICENQDSISSKLKECCEKPLLEKSHCIAEVENDEMPA |
| | | DLPSLAADFVESKDVCKNYAEAKDVFLGMFLYEYARRHPDYSVVLLLRLAKTYETTLEKC |
| | | CAAADPHECYAKVFDEFKPLVEEPQNLIKQNCELFEQLGEYKFQNALLVRYTKKVPQVST |
| | | PTLVEVSRNLGKVGSKCCKHPEAKRMPCAEDYLSVVLNQLCVLHEKTPVSDRVTKCCTES |
| | | LVNRRPCFSALEVDETYVPKEFNAETFTFHADICTLSEKERQIKKQTALVELVKHKPKAT |
| | | KEQLKAVMDDFAAFVEKCCKADDKETCFAEEGKKLVAASQAALGLGSPAPAPPAPAPGSA |
| | | RNGDHCPLGPGRCCRLHTVRASLEDLGWADWVLSPREVQVTMCIGACPSQFRAANMHAQI |
| | | KTSLHRLKPDTVPAPCCVPASYNPMVLIQKTDTGVSLQTYDDLLAKDCHCI |
| HSA- | 199 | DAHKSEVAHRFKDLGEENFKALVLIAFAQYLQQCPFEDHVKLVNEVTEFAKTCVADESAE |
| GSAAQAAQQGS- | | NCDKSLHTLFGDKLCTVATLRETYGEMADCCAKQEPERNECFLQHKDDNPNLPRLVRPEV |
| GDF15 | | DVMCTAFHDNEETFLKKYLYEIARRHPYFYAPELLFFAKRYKAAFTECCQAADKAACLLP |
| | | KLDELRDEGKASSAKQRLKCASLQKFGERAFKAWAVARLSQRFPKAEFAEVSKLVTDLTK |
| | | VHTECCHGDLLECADDRADLAKYICENQDSISSKLKECCEKPLLEKSHCIAEVENDEMPA |
| | | DLPSLAADFVESKDVCKNYAEAKDVFLGMFLYEYARRHPDYSVVLLLRLAKTYETTLEKC |
| | | CAAADPHECYAKVFDEFKPLVEEPQNLIKQNCELFEQLGEYKFQNALLVRYTKKVPQVST |
| | | PTLVEVSRNLGKVGSKCCKHPEAKRMPCAEDYLSVVLNQLCVLHEKTPVSDRVTKCCTES |
| | | LVNRRPCFSALEVDETYVPKEFNAETFTFHADICTLSEKERQIKKQTALVELVKHKPKAT |
| | | KEQLKAVMDDFAAFVEKCCKADDKETCFAEEGKKLVAASQAALGLGSAAQAAQQGSARNG |
| | | DHCPLGPGRCCRLHTVRASLEDLGWADWVLSPREVQVTMCIGACPSQFRAANMHAQIKTS |
| | | LHRLKPDTVPAPCCVPASYNPMVLIQKTDTGVSLQTYDDLLAKDCHCI |
| HSA- | 200 | DAHKSEVAHRFKDLGEENFKALVLIAFAQYLQQCPFEDHVKLVNEVTEFAKTCVADESAE |
| GS(AAQAAQQ)2GS- | | NCDKSLHTLFGDKLCTVATLRETYGEMADCCAKQEPERNECFLQHKDDNPNLPRLVRPEV |
| GDF15 | | DVMCTAFHDNEETFLKKYLYEIARRHPYFYAPELLFFAKRYKAAFTECCQAADKAACLLP |
| | | KLDELRDEGKASSAKQRLKCASLQKFGERAFKAWAVARLSQRFPKAEFAEVSKLVTDLTK |
| | | VHTECCHGDLLECADDRADLAKYICENQDSISSKLKECCEKPLLEKSHCIAEVENDEMPA |
| | | DLPSLAADFVESKDVCKNYAEAKDVFLGMFLYEYARRHPDYSVVLLLRLAKTYETTLEKC |
| | | CAAADPHECYAKVFDEFKPLVEEPQNLIKQNCELFEQLGEYKFQNALLVRYTKKVPQVST |
| | | PTLVEVSRNLGKVGSKCCKHPEAKRMPCAEDYLSVVLNQLCVLHEKTPVSDRVTKCCTES |
| | | LVNRRPCFSALEVDETYVPKEFNAETFTFHADICTLSEKERQIKKQTALVELVKHKPKAT |
| | | KEQLKAVMDDFAAFVEKCCKADDKETCFAEEGKKLVAASQAALGLGSAAQAAQQAAQAAQ |
| | | QGSARNGDHCPLGPGRCCRLHTVRASLEDLGWADWVLSPREVQVTMCIGACPSQFRAANM |
| | | HAQIKTSLHRLKPDTVPAPCCVPASYNPMVLIQKTDTGVSLQTYDDLLAKDCHCI |
| HSA- | 201 | DAHKSEVAHRFKDLGEENFKALVLIAFAQYLQQCPFEDHVKLVNEVTEFAKTCVADESAE |
| GGNAEAAAKEAA | | NCDKSLHTLFGDKLCTVATLRETYGEMADCCAKQEPERNECFLQHKDDNPNLPRLVRPEV |
| AKEAAAKAGG- | | DVMCTAFHDNEETFLKKYLYEIARRHPYFYAPELLFFAKRYKAAFTECCQAADKAACLLP |
| GDF15 | | KLDELRDEGKASSAKQRLKCASLQKFGERAFKAWAVARLSQRFPKAEFAEVSKLVTDLTK |
| | | VHTECCHGDLLECADDRADLAKYICENQDSISSKLKECCEKPLLEKSHCIAEVENDEMPA |
| | | DLPSLAADFVESKDVCKNYAEAKDVFLGMFLYEYARRHPDYSVVLLLRLAKTYETTLEKC |
| | | CAAADPHECYAKVFDEFKPLVEEPQNLIKQNCELFEQLGEYKFQNALLVRYTKKVPQVST |
| | | PTLVEVSRNLGKVGSKCCKHPEAKRMPCAEDYLSVVLNQLCVLHEKTPVSDRVTKCCTES |
| | | LVNRRPCFSALEVDETYVPKEFNAETFTFHADICTLSEKERQIKKQTALVELVKHKPKAT |
| | | KEQLKAVMDDFAAFVEKCCKADDKETCFAEEGKKLVAASQAALGLGGNAEAAAKEAAAKE |
| | | AAAKEAAAKAGGARNGDHCPLGPGRCCRLHTVRASLEDLGWADWVLSPREVQVTMCIGAC |
| | | PSQFRAANMHAQIKTSLHRLKPDTVPAPCCVPASYNPMVLIQKTDTGVSLQTYDDLLAKD |
| | | CHCI |
| HSA-(G4S)6- | 202 | DAHKSEVAHRFKDLGEENFKALVLIAFAQYLQQCPFEDHVKLVNEVTEFADAHKSEVAHR |
| GDF15 | | FKDLGEENFKALVLIAFAQYLQQCPFEDHVKLVNEVTEFAKTCVADESAENCDKSLHTLF |
| | | GDKLCTVATLRETYGEMADCCAKQEPERNECFLQHKDDNPNLPRLVRPEVDVMCTAFHDN |
| | | EETFLKKYLYEIARRHPYFYAPELLFFAKRYKAAFTECCQAADKAACLLPKLDELRDEGK |
| | | ASSAKQRLKCASLQKFGERAFKAWAVARLSQRFPKAEFAEVSKLVTDLTKVHTECCHGDL |
| | | LECADDRADLAKYICENQDSISSKLKECCEKPLLEKSHCIAEVENDEMPADLPSLAADFV |
| | | ESKDVCKNYAEAKDVFLGMFLYEYARRHPDYSVVLLLRLAKTYETTLEKCCAAADPHECY |
| | | AKVFDEFKPLVEEPQNLIKQNCELFEQLGEYKFQNALLVRYTKKVPQVSTPTLVEVSRNL |
| | | GKVGSKCCKHPEAKRMPCAEDYLSVVLNQLCVLHEKTPVSDRVTKCCTESLVNRRPCFSA |
| | | LEVDETYVPKEFNAETFTFHADICTLSEKERQIKKQTALVELVKHKPKATKEQLKAVMDD |
| | | FAAFVEKCCKADDKETCFAEEGKKLVAASQAALGLGGGGSGGGGSGGGGSGGGGSGGGGS |
| | | GGGGSARNGDHCPLGPGRCCRLHTVRASLEDLGWADWVLSPREVQVTMCIGACPSQFRAA |
| | | NMHAQIKTSLHRLKPDTVPAPCCVPASYNPMVLIQKTDTGVSLQTYDDLLAKDCHCI |
| HSA- | 203 | DAHKSEVAHRFKDLGEENFKALVLIAFAQYLQQCPFEDHVKLVNEVTEFAKTCVADESAE |
| GS(AAQAAQQ)2GS- | | NCDKSLHTLFGDKLCTVATLRETYGEMADCCAKQEPERNECFLQHKDDNPNLPRLVRPEV |
| GDF15(N3D) | | DVMCTAFHDNEETFLKKYLYEIARRHPYFYAPELLFFAKRYKAAFTECCQAADKAACLLP |
| | | KLDELRDEGKASSAKQRLKCASLQKFGERAFKAWAVARLSQRFPKAEFAEVSKLVTDLTK |
| | | VHTECCHGDLLECADDRADLAKYICENQDSISSKLKECCEKPLLEKSHCIAEVENDEMPA |
| | | DLPSLAADFVESKDVCKNYAEAKDVFLGMFLYEYARRHPDYSVVLLLRLAKTYETTLEKC |
| | | CAAADPHECYAKVFDEFKPLVEEPQNLIKQNCELFEQLGEYKFQNALLVRYTKKVPQVST |
| | | PTLVEVSRNLGKVGSKCCKHPEAKRMPCAEDYLSVVLNQLCVLHEKTPVSDRVTKCCTES |
| | | LVNRRPCFSALEVDETYVPKEFNAETFTFHADICTLSEKERQIKKQTALVELVKHKPKAT |
| | | KEQLKAVMDDFAAFVEKCCKADDKETCFAEEGKKLVAASQAALGLGSAAQAAQQAAQAAQ |
| | | QGSARDGDHCPLGPGRCCRLHTVRASLEDLGWADWVLSPREVQVTMCIGACPSQFRAANM |
| | | HAQIKTSLHRLKPDTVPAPCCVPASYNPMVLIQKTDTGVSLQTYDDLLAKDCHCI |
| DhCpmFc(+)(N297G) | 204 | APELLGGPSVFLFPPKPKDTLMISRTPEVTCVVVDVSHEDPEVKFNWYVDGVEVHNAKTK |
| | | PREEQYGSTYRVVSVLTVLHQDWLNGKEYKCKVSNKALPAPIEKTISKAKGQPREPQVYT |
| | | LPPSRKEMTKNQVSLTCLVKGFYPSDIAVEWESNGQPENNYKTTPPVLKSDGSFFLYSKL |
| | | TVDKSRWQQGNVFSCSVMHEALHNHYTQKSLSLSPGK |
| DhCpmFc(−) | 205 | APELLGGPSVFLFPPKPKDTLMISRTPEVTCVVVDVSHEDPEVKFNWYVDGVEVHNAKTK |
| (N297G)- | | PREEQYGSTYRVVSVLTVLHQDWLNGKEYKCKVSNKALPAPIEKTISKAKGQPREPQVYT |
| GDF15(Ndel3) | | LPPSREEMTKNQVSLTCLVKGFYPSDIAVEWESNGQPENNYDTTPPVLDSDGSFFLYSDL |
| | | TVDKSRWQQGNVFSCSVMHEALHNHYTQKSLSLSPGGDHCPLGPGRCCRLHTVRASLEDL |
| | | GWADWVLSPREVQVTMCIGACPSQFRAANMHAQIKTSLHRLKPDTVPAPCCVPASYNPMV |
| | | LIQKTDTGVSLQTYDDLLAKDCHCI |
| DhCpmFc(−) | 206 | APELLGGPSVFLFPPKPKDTLMISRTPEVTCVVVDVSHEDPEVKFNWYVDGVEVHNAKTK |
| (N297G) | | PREEQYGSTYRVVSVLTVLHQDWLNGKEYKCKVSNKALPAPIEKTISKAKGQPREPQVYT |
| | | LPPSREEMTKNQVSLTCLVKGFYPSDIAVEWESNGQPENNYDTTPPVLDSDGSFFLYSDL |
| | | TVDKSRWQQGNVFSCSVMHEALHNHYTQKSLSLSPG |
| DhCpmFc(+)(N297G) | 207 | APELLGGPSVFLFPPKPKDTLMISRTPEVTCVVVDVSHEDPEVKFNWYVDGVEVHNAKTK |
| | | PREEQYGSTYRVVSVLTVLHQDWLNGKEYKCKVSNKALPAPIEKTISKAKGQPREPQVYT |
| | | LPPSRKEMTKNQVSLTCLVKGFYPSDIAVEWESNGQPENNYKTTPPVLKSDGSFFLYSKL |
| | | TVDKSRWQQGNVFSCSVMHEALHNHYTQKSLSLSPG |
| DhCpmFc(−) | 208 | APELLGGPSVFLFPPKPKDTLMISRTPEVTCVVVDVSHEDPEVKFNWYVDGVEVHNAKTK |
| (N297G)- | | PREEQYGSTYRVVSVLTVLHQDWLNGKEYKCKVSNKALPAPIEKTISKAKGQPREPQVYT |
| GDF15(ND3) | | LPPSREEMTKNQVSLTCLVKGFYPSDIAVEWESNGQPENNYDTTPPVLDSDGSFFLYSDL |
| | | TVDKSRWQQGNVFSCSVMHEALHNHYTQKSLSLSPGARDGDHCPLGPGRCCRLHTVRASL |
| | | EDLGWADWVLSPREVQVTMCIGACPSQFRAANMHAQIKTSLHRLKPDTVPAPCCVPASYN |
| | | PMVLIQKTDTGVSLQTYDDLLAKDCHCI |
| DhCpmFc(−) | 209 | APELLGGPSVFLFPPKPKDTLMISRTPEVTCVVVDVSHEDPEVKFNWYVDGVEVHNAKTK |
| (N297G)-G4- | | PREEQYGSTYRVVSVLTVLHQDWLNGKEYKCKVSNKALPAPIEKTISKAKGQPREPQVYT |
| GDF15(N3D) | | LPPSREEMTKNQVSLTCLVKGFYPSDIAVEWESNGQPENNYDTTPPVLDSDGSFFLYSDL |
| | | TVDKSRWQQGNVFSCSVMHEALHNHYTQKSLSLSPGGGGGARDGDHCPLGPGRCCRLHTV |
| | | RASLEDLGWADWVLSPREVQVTMCIGACPSQFRAANMHAQIKTSLHRLKPDTVPAPCCVP |
| | | ASYNPMVLIQKTDTGVSLQTYDDLLAKDCHCI |
| DhCpmFc(+)(N297G) | 210 | APELLGGPSVFLFPPKPKDTLMISRTPEVTCVVVDVSHEDPEVKFNWYVDGVEVHNAKTK |
| (S354C) | | PREEQYGSTYRVVSVLTVLHQDWLNGKEYKCKVSNKALPAPIEKTISKAKGQPREPQVYT |
| | | LPPCRKEMTKNQVSLTCLVKGFYPSDIAVEWESNGQPENNYKTTPPVLKSDGSFFLYSKL |
| | | TVDKSRWQQGNVFSCSVMHEALHNHYTQKSLSLSPGK |
| DhCpmFc(−) | 211 | APELLGGPSVFLFPPKPKDTLMISRTPEVTCVVVDVSHEDPEVKFNWYVDGVEVHNAKTK |
| (N297G)(Y349C)- | | PREEQYGSTYRVVSVLTVLHQDWLNGKEYKCKVSNKALPAPIEKTISKAKGQPREPQVCT |
| GDF15(Ndel3) | | LPPSREEMTKNQVSLTCLVKGFYPSDIAVEWESNGQPENNYDTTPPVLDSDGSFFLYSDL |
| | | TVDKSRWQQGNVFSCSVMHEALHNHYTQKSLSLSPGGDHCPLGPGRCCRLHTVRASLEDL |
| | | GWADWVLSPREVQVTMCIGACPSQFRAANMHAQIKTSLHRLKPDTVPAPCCVPASYNPMV |
| | | LIQKTDTGVSLQTYDDLLAKDCHCI |
| DhCpmFc(−) | 212 | APELLGGPSVFLFPPKPKDTLMISRTPEVTCVVVDVSHEDPEVKFNWYVDGVEVHNAKTK |
| (N297G)(Y349C) | | PREEQYGSTYRVVSVLTVLHQDWLNGKEYKCKVSNKALPAPIEKTISKAKGQPREPQVCT |
| | | LPPSREEMTKNQVSLTCLVKGFYPSDIAVEWESNGQPENNYDTTPPVLDSDGSFFLYSDL |
| | | TVDKSRWQQGNVFSCSVMHEALHNHYTQKSLSLSPG |
| DhCpmFc(+)(N297G) | 213 | APELLGGPSVFLFPPKPKDTLMISRTPEVTCVVVDVSHEDPEVKFNWYVDGVEVHNAKTK |
| (S354C) | | PREEQYGSTYRVVSVLTVLHQDWLNGKEYKCKVSNKALPAPIEKTISKAKGQPREPQVYT |
| | | LPPCRKEMTKNQVSLTCLVKGFYPSDIAVEWESNGQPENNYKTTPPVLKSDGSFFLYSKL |
| | | TVDKSRWQQGNVFSCSVMHEALHNHYTQKSLSLSPG |
| DhCpmFc(−) | 214 | APELLGGPSVFLFPPKPKDTLMISRTPEVTCVVVDVSHEDPEVKFNWYVDGVEVHNAKTK |
| (N297G)(Y349C)- | | PREEQYGSTYRVVSVLTVLHQDWLNGKEYKCKVSNKALPAPIEKTISKAKGQPREPQVCT |
| GDF15(N3D) | | LPPSREEMTKNQVSLTCLVKGFYPSDIAVEWESNGQPENNYDTTPPVLDSDGSFFLYSDL |
| | | TVDKSRWQQGNVFSCSVMHEALHNHYTQKSLSLSPGARDGDHCPLGPGRCCRLHTVRASL |
| | | EDLGWADWVLSPREVQVTMCIGACPSQFRAANMHAQIKTSLHRLKPDTVPAPCCVPASYN |
| | | PMVLIQKTDTGVSLQTYDDLLAKDCHCI |
| DhCpmFc(+)(N297G) | 215 | APELLGGPSVFLFPPKPKDTLMISRTPEVTCVVVDVSHEDPEVKFNWYVDGVEVHNAKTK |
| (L351C) | | PREEQYGSTYRVVSVLTVLHQDWLNGKEYKCKVSNKALPAPIEKTISKAKGQPREPQVYT |
| | | CPPSREEMTKNQVSLTCLVKGFYPSDIAVEWESNGQPENNYKTTPPVLKSDGSFFLYSKL |
| | | TVDKSRWQQGNVFSCSVMHEALHNHYTQKSLSLSPGK |
| DhCpmFc(−) | 216 | APELLGGPSVFLFPPKPKDTLMISRTPEVTCVVVDVSHEDPEVKFNWYVDGVEVHNAKTK |
| (N297G)(L351C)- | | PREEQYGSTYRVVSVLTVLHQDWLNGKEYKCKVSNKALPAPIEKTISKAKGQPREPQVYT |
| GDF15(Ndel3) | | CPPSRKEMTKNQVSLTCLVKGFYPSDIAVEWESNGQPENNYKTTPPVLKSDGSFFLYSKL |
| | | TVDKSRWQQGNVFSCSVMHEALHNHYTQKSLSLSPGARNGDHCPLGPGRCCRLHTVRASL |
| | | EDLGWADWVLSPREVQVTMCIGACPSQFRAANMHAQIKTSLHRLKPDTVPAPCCVPASYN |
| | | PMVLIQKTDTGVSLQTYDDLLAKDCHCI |
| DhCpmFc(−) | 217 | APELLGGPSVFLFPPKPKDTLMISRTPEVTCVVVDVSHEDPEVKFNWYVDGVEVHNAKTK |
| (N297G)(L351C) | | PREEQYGSTYRVVSVLTVLHQDWLNGKEYKCKVSNKALPAPIEKTISKAKGQPREPQVYT |
| | | CPPSREEMTKNQVSLTCLVKGFYPSDIAVEWESNGQPENNYDTTPPVLDSDGSFFLYSDL |
| | | TVDKSRWQQGNVFSCSVMHEALHNHYTQKSLSLSPG |
| DhCpmFc(+)(N297G) | 218 | APELLGGPSVFLFPPKPKDTLMISRTPEVTCVVVDVSHEDPEVKFNWYVDGVEVHNAKTK |
| (L351C) | | PREEQYGSTYRVVSVLTVLHQDWLNGKEYKCKVSNKALPAPIEKTISKAKGQPREPQVYT |
| | | CPPSREEMTKNQVSLTCLVKGFYPSDIAVEWESNGQPENNYKTTPPVLKSDGSFFLYSKL |
| | | TVDKSRWQQGNVFSCSVMHEALHNHYTQKSLSLSPG |
| DhCpmFc(−) | 219 | APELLGGPSVFLFPPKPKDTLMISRTPEVTCVVVDVSHEDPEVKFNWYVDGVEVHNAKTK |
| (N297G)(L351C)- | | PREEQYGSTYRVVSVLTVLHQDWLNGKEYKCKVSNKALPAPIEKTISKAKGQPREPQVYT |
| GDF15(N3D) | | CPPSRKEMTKNQVSLTCLVKGFYPSDIAVEWESNGQPENNYKTTPPVLKSDGSFFLYSKL |
| | | TVDKSRWQQGNVFSCSVMHEALHNHYTQKSLSLSPGARDGDHCPLGPGRCCRLHTVRASL |
| | | EDLGWADWVLSPREVQVTMCIGACPSQFRAANMHAQIKTSLHRLKPDTVPAPCCVPASYN |
| | | PMVLIQKTDTGVSLQTYDDLLAKDCHCI |
| DhCpmFc(+)(N297G) | 220 | APELLGGPSVFLFPPKPKDTLMISRTPEVTCVVVDVSHEDPEVKFNWYVDGVEVHNCKTK |
| (L306C) | | PREEQYGSTYRVVSVCTVLHQDWLNGKEYKCKVSNKALPAPIEKTISKAKGQPREPQVYT |
| | | LPPSRKEMTKNQVSLTCLVKGFYPSDIAVEWESNGQPENNYKTTPPVLKSDGSFFLYSKL |
| | | TVDKSRWQQGNVFSCSVMHEALHNHYTQKSLSLSPGK |
| DhCpmFc(−) | 221 | APELLGGPSVFLFPPKPKDTLMISRTPEVTCVVVDVSHEDPEVKFNWYVDGVEVHNCKTK |
| (N297G)(A287C)- | | PREEQYGSTYRVVSVCTVLHQDWLNGKEYKCKVSNKALPAPIEKTISKAKGQPREPQVYT |
| GDF15(Ndel3) | | LPPSREEMTKNQVSLTCLVKGFYPSDIAVEWESNGQPENNYDTTPPVLDSDGSFFLYSDL |
| | | TVDKSRWQQGNVFSCSVMHEALHNHYTQKSLSLSPGGDHCPLGPGRCCRLHTVRASLEDL |
| | | GWADWVLSPREVQVTMCIGACPSQFRAANMHAQIKTSLHRLKPDTVPAPCCVPASYNPMV |
| | | LIQKTDTGVSLQTYDDLLAKDCHCI |
| DhCpmFc(−) | 222 | APELLGGPSVFLFPPKPKDTLMISRTPEVTCVVVDVSHEDPEVKFNWYVDGVEVHNCKTK |
| (N297G)(A287C) | | PREEQYGSTYRVVSVCTVLHQDWLNGKEYKCKVSNKALPAPIEKTISKAKGQPREPQVYT |
| | | LPPSREEMTKNQVSLTCLVKGFYPSDIAVEWESNGQPENNYDTTPPVLDSDGSFFLYSDL |
| | | TVDKSRWQQGNVFSCSVMHEALHNHYTQKSLSLSPG |
| DhCpmFc(+)(N297G) | 223 | APELLGGPSVFLFPPKPKDTLMISRTPEVTCVVVDVSHEDPEVKFNWYVDGVEVHNCKTK |
| (L306C) | | PREEQYGSTYRVVSVCTVLHQDWLNGKEYKCKVSNKALPAPIEKTISKAKGQPREPQVYT |
| | | LPPSRKEMTKNQVSLTCLVKGFYPSDIAVEWESNGQPENNYKTTPPVLKSDGSFFLYSKL |
| | | TVDKSRWQQGNVFSCSVMHEALHNHYTQKSLSLSPG |
| DhCpmFc(−) | 224 | APELLGGPSVFLFPPKPKDTLMISRTPEVTCVVVDVSHEDPEVKFNWYVDGVEVHNCKTK |
| (N297G)(A287C)- | | PREEQYGSTYRVVSVCTVLHQDWLNGKEYKCKVSNKALPAPIEKTISKAKGQPREPQVYT |
| GDF15(N3D) | | LPPSREEMTKNQVSLTCLVKGFYPSDIAVEWESNGQPENNYDTTPPVLDSDGSFFLYSDL |
| | | TVDKSRWQQGNVFSCSVMHEALHNHYTQKSLSLSPGARDGDHCPLGPGRCCRLHTVRASL |
| | | EDLGWADWVLSPREVQVTMCIGACPSQFRAANMHAQIKTSLHRLKPDTVPAPCCVPASYN |
| | | PMVLIQKTDTGVSLQTYDDLLAKDCHCI |
| DhCpmFc(+)(N297G) | 225 | APELLGGPSVFLFPPKPKDTLMISRTPEVTCVVVDVSHEDPEVKFNWYVDGVEVHNCKTK |
| (L306C) | | PREEQYGSTYRVVSVCTVLHQDWLNGKEYKCKVSNKALPAPIEKTISKAKGQPREPQVYT |
| (S354C) | | LPPCRKEMTKNQVSLTCLVKGFYPSDIAVEWESNGQPENNYKTTPPVLKSDGSFFLYSKL |
| | | TVDKSRWQQGNVFSCSVMHEALHNHYTQKSLSLSPGK |
| DhCpmFc(−) | 226 | APELLGGPSVFLFPPKPKDTLMISRTPEVTCVVVDVSHEDPEVKFNWYVDGVEVHNCKTK |
| (N297G)(A287C) | | PREEQYGSTYRVVSVCTVLHQDWLNGKEYKCKVSNKALPAPIEKTISKAKGQPREPQVCT |
| (Y349C)- | | LPPSREEMTKNQVSLTCLVKGFYPSDIAVEWESNGQPENNYDTTPPVLDSDGSFFLYSDL |
| GDF15(Ndel3) | | TVDKSRWQQGNVFSCSVMHEALHNHYTQKSLSLSPGGDHCPLGPGRCCRLHTVRASLEDL |
| | | GWADWVLSPREVQVTMCIGACPSQFRAANMHAQIKTSLHRLKPDTVPAPCCVPASYNPMV |
| | | LIQKTDTGVSLQTYDDLLAKDCHCI |
| DhCpmFc(−) | 227 | APELLGGPSVFLFPPKPKDTLMISRTPEVTCVVVDVSHEDPEVKFNWYVDGVEVHNCKTK |
| (N297G)(A287C) | | PREEQYGSTYRVVSVCTVLHQDWLNGKEYKCKVSNKALPAPIEKTISKAKGQPREPQVCT |
| (S354C) | | LPPSREEMTKNQVSLTCLVKGFYPSDIAVEWESNGQPENNYDTTPPVLDSDGSFFLYSDL |
| | | TVDKSRWQQGNVFSCSVMHEALHNHYTQKSLSLSPG |
| DhCpmFc(+)(N297G) | 228 | APELLGGPSVFLFPPKPKDTLMISRTPEVTCVVVDVSHEDPEVKFNWYVDGVEVHNCKTK |
| (L306C) | | PREEQYGSTYRVVSVCTVLHQDWLNGKEYKCKVSNKALPAPIEKTISKAKGQPREPQVYT |
| (Y349C) | | LPPCRKEMTKNQVSLTCLVKGFYPSDIAVEWESNGQPENNYKTTPPVLKSDGSFFLYSKL |
| | | TVDKSRWQQGNVFSCSVMHEALHNHYTQKSLSLSPG |
| DhCpmFc(−) | 229 | APELLGGPSVFLFPPKPKDTLMISRTPEVTCVVVDVSHEDPEVKFNWYVDGVEVHNCKTK |
| (N297G)(A287C) | | PREEQYGSTYRVVSVCTVLHQDWLNGKEYKCKVSNKALPAPIEKTISKAKGQPREPQVCT |
| (Y349C)- | | LPPSREEMTKNQVSLTCLVKGFYPSDIAVEWESNGQPENNYDTTPPVLDSDGSFFLYSDL |
| GDF15(N3D) | | TVDKSRWQQGNVFSCSVMHEALHNHYTQKSLSLSPGARDGDHCPLGPGRCCRLHTVRASL |
| | | EDLGWADWVLSPREVQVTMCIGACPSQFRAANMHAQIKTSLHRLKPDTVPAPCCVPASYN |
| | | PMVLIQKTDTGVSLQTYDDLLAKDCHCI |
| Dh2CpmFc(+) | 230 | PSVFLFPPKPKDTLMISRTPEVTCVVVDVSHEDPEVKFNWYVDGVEVHNAKTKPREEQYN |
| | | STYRVVSVLTVLHQDWLNGKEYKCKVSNKALPAPIEKTISKAKGQPREPQVYTLPPSRKE |
| | | MTKNQVSLTCLVKGFYPSDIAVEWESNGQPENNYKTTPPVLKSDGSFFLYSKLTVDKSRW |
| | | QQGNVFSCSVMHEALHNHYTQKSLSLSPGK |
| Dh2CpmFc(−)- | 231 | PSVFLFPPKPKDTLMISRTPEVTCVVVDVSHEDPEVKFNWYVDGVEVHNAKTKPREEQYN |
| GDF15(Ndel3) | | STYRVVSVLTVLHQDWLNGKEYKCKVSNKALPAPIEKTISKAKGQPREPQVYTLPPSREE |
| | | MTKNQVSLTCLVKGFYPSDIAVEWESNGQPENNYDTTPPVLDSDGSFFLYSDLTVDKSRW |
| | | QQGNVFSCSVMHEALHNHYTQKSLSLSPGGDHCPLGPGRCCRLHTVRASLEDLGWADWVL |
| | | SPREVQVTMCIGACPSQFRAANMHAQIKTSLHRLKPDTVPAPCCVPASYNPMVLIQKTDT |
| | | GVSLQTYDDLLAKDCHCI |
| Dh2CpmFc(−) | 232 | PSVFLFPPKPKDTLMISRTPEVTCVVVDVSHEDPEVKFNWYVDGVEVHNAKTKPREEQYN |
| | | STYRVVSVLTVLHQDWLNGKEYKCKVSNKALPAPIEKTISKAKGQPREPQVYTLPPSREE |
| | | MTKNQVSLTCLVKGFYPSDIAVEWESNGQPENNYDTTPPVLDSDGSFFLYSDLTVDKSRW |
| | | QQGNVFSCSVMHEALHNHYTQKSLSLSPG |
| Dh2CpmFc(+) | 233 | PSVFLFPPKPKDTLMISRTPEVTCVVVDVSHEDPEVKFNWYVDGVEVHNAKTKPREEQYN |
| | | STYRVVSVLTVLHQDWLNGKEYKCKVSNKALPAPIEKTISKAKGQPREPQVYTLPPSRKE |
| | | MTKNQVSLTCLVKGFYPSDIAVEWESNGQPENNYKTTPPVLKSDGSFFLYSKLTVDKSRW |
| | | QQGNVFSCSVMHEALHNHYTQKSLSLSPG |
| Dh2CpmFc(−)- | 234 | PSVFLFPPKPKDTLMISRTPEVTCVVVDVSHEDPEVKFNWYVDGVEVHNAKTKPREEQYN |
| GDF15(N3D) | | STYRVVSVLTVLHQDWLNGKEYKCKVSNKALPAPIEKTISKAKGQPREPQVYTLPPSREE |
| | | MTKNQVSLTCLVKGFYPSDIAVEWESNGQPENNYDTTPPVLDSDGSFFLYSDLTVDKSRW |
| | | QQGNVFSCSVMHEALHNHYTQKSLSLSPGARDGDHCPLGPGRCCRLHTVRASLEDLGWAD |
| | | WVLSPREVQVTMCIGACPSQFRAANMHAQIKTSLHRLKPDTVPAPCCVPASYNPMVLIQK |
| | | TDTGVSLQTYDDLLAKDCHCI |
| Dh2CpmFc(+)(S354C) | 235 | PSVFLFPPKPKDTLMISRTPEVTCVVVDVSHEDPEVKFNWYVDGVEVHNAKTKPREEQYN |
| | | STYRVVSVLTVLHQDWLNGKEYKCKVSNKALPAPIEKTISKAKGQPREPQVYTLPPCRKE |
| | | MTKNQVSLTCLVKGFYPSDIAVEWESNGQPENNYKTTPPVLKSDGSFFLYSKLTVDKSRW |
| | | QQGNVFSCSVMHEALHNHYTQKSLSLSPGK |
| Dh2CpmFc(−) | 236 | PSVFLFPPKPKDTLMISRTPEVTCVVVDVSHEDPEVKFNWYVDGVEVHNAKTKPREEQYN |
| (Y349C)- | | STYRVVSVLTVLHQDWLNGKEYKCKVSNKALPAPIEKTISKAKGQPREPQVCTLPPSREE |
| GDF15(Ndel3) | | MTKNQVSLTCLVKGFYPSDIAVEWESNGQPENNYDTTPPVLDSDGSFFLYSDLTVDKSRW |
| | | QQGNVFSCSVMHEALHNHYTQKSLSLSPGGDHCPLGPGRCCRLHTVRASLEDLGWADWVL |
| | | SPREVQVTMCIGACPSQFRAANMHAQIKTSLHRLKPDTVPAPCCVPASYNPMVLIQKTDT |
| | | GVSLQTYDDLLAKDCHCI |
| Dh2CpmFc(−) | 237 | PSVFLFPPKPKDTLMISRTPEVTCVVVDVSHEDPEVKFNWYVDGVEVHNAKTKPREEQYN |
| (Y349C) | | STYRVVSVLTVLHQDWLNGKEYKCKVSNKALPAPIEKTISKAKGQPREPQVCTLPPSREE |
| | | MTKNQVSLTCLVKGFYPSDIAVEWESNGQPENNYDTTPPVLDSDGSFFLYSDLTVDKSRW |
| | | QQGNVFSCSVMHEALHNHYTQKSLSLSPG |
| Dh2CpmFc(+) | 238 | PSVFLFPPKPKDTLMISRTPEVTCVVVDVSHEDPEVKFNWYVDGVEVHNAKTKPREEQYN |
| (S354C) | | STYRVVSVLTVLHQDWLNGKEYKCKVSNKALPAPIEKTISKAKGQPREPQVYTLPPCRKE |
| | | MTKNQVSLTCLVKGFYPSDIAVEWESNGQPENNYKTTPPVLKSDGSFFLYSKLTVDKSRW |
| | | QQGNVFSCSVMHEALHNHYTQKSLSLSPG |
| Dh2CpmFc(−) | 239 | PSVFLFPPKPKDTLMISRTPEVTCVVVDVSHEDPEVKFNWYVDGVEVHNAKTKPREEQYN |
| (Y349C)- | | STYRVVSVLTVLHQDWLNGKEYKCKVSNKALPAPIEKTISKAKGQPREPQVCTLPPSREE |
| GDF15(N3D) | | MTKNQVSLTCLVKGFYPSDIAVEWESNGQPENNYDTTPPVLDSDGSFFLYSDLTVDKSRW |
| | | QQGNVFSCSVMHEALHNHYTQKSLSLSPGARDGDHCPLGPGRCCRLHTVRASLEDLGWAD |
| | | WVLSPREVQVTMCIGACPSQFRAANMHAQIKTSLHRLKPDTVPAPCCVPASYNPMVLIQK |
| | | TDTGVSLQTYDDLLAKDCHCI |
| CpmFc(+)(N297G) | 240 | DKTHTCPPCPAPELLGGPSVFLFPPKPKDTLMISRTPEVTCVVVDVSHEDPEVKFNWYVD |
| | | GVEVHNAKTKPREEQYGSTYRVVSVLTVLHQDWLNGKEYKCKVSNKALPAPIEKTISKAK |
| | | GQPREPQVYTLPPSRKEMTKNQVSLTCLVKGFYPSDIAVEWESNGQPENNYKTTPPVLKS |
| | | DGSFFLYSKLTVDKSRWQQGNVFSCSVMHEALHNHYTQKSLSLSPGK |
| CpmFc(−) | 241 | DKTHTCPPCPAPELLGGPSVFLFPPKPKDTLMISRTPEVTCVVVDVSHEDPEVKFNWYVD |
| (N297G)- | | GVEVHNAKTKPREEQYGSTYRVVSVLTVLHQDWLNGKEYKCKVSNKALPAPIEKTISKAK |
| GDF15(Ndel3) | | GQPREPQVYTLPPSREEMTKNQVSLTCLVKGFYPSDIAVEWESNGQPENNYDTTPPVLDS |
| | | DGSFFLYSDLTVDKSRWQQGNVFSCSVMHEALHNHYTQKSLSLSPGGDHCPLGPGRCCRL |
| | | HTVRASLEDLGWADWVLSPREVQVTMCIGACPSQFRAANMHAQIKTSLHRLKPDTVPAPC |
| | | CVPASYNPMVLIQKTDTGVSLQTYDDLLAKDCHCI |
| CpmFc(−) | 242 | DKTHTCPPCPAPELLGGPSVFLFPPKPKDTLMISRTPEVTCVVVDVSHEDPEVKFNWYVD |
| (N297G) | | GVEVHNAKTKPREEQYGSTYRVVSVLTVLHQDWLNGKEYKCKVSNKALPAPIEKTISKAK |
| | | GQPREPQVYTLPPSREEMTKNQVSLTCLVKGFYPSDIAVEWESNGQPENNYDTTPPVLDS |
| | | DGSFFLYSDLTVDKSRWQQGNVFSCSVMHEALHNHYTQKSLSLSPG |
| CpmFc(+)(N297G) | 243 | DKTHTCPPCPAPELLGGPSVFLFPPKPKDTLMISRTPEVTCVVVDVSHEDPEVKFNWYVD |
| | | GVEVHNAKTKPREEQYGSTYRVVSVLTVLHQDWLNGKEYKCKVSNKALPAPIEKTISKAK |
| | | GQPREPQVYTLPPSRKEMTKNQVSLTCLVKGFYPSDIAVEWESNGQPENNYKTTPPVLKS |
| | | DGSFFLYSKLTVDKSRWQQGNVFSCSVMHEALHNHYTQKSLSLSPG |
| CpmFc(−) | 244 | DKTHTCPPCPAPELLGGPSVFLFPPKPKDTLMISRTPEVTCVVVDVSHEDPEVKFNWYVD |
| (N297G)- | | GVEVHNAKTKPREEQYGSTYRVVSVLTVLHQDWLNGKEYKCKVSNKALPAPIEKTISKAK |
| GDF15(N3D) | | GQPREPQVYTLPPSREEMTKNQVSLTCLVKGFYPSDIAVEWESNGQPENNYDTTPPVLDS |
| | | DGSFFLYSDLTVDKSRWQQGNVFSCSVMHEALHNHYTQKSLSLSPGARDGDHCPLGPGRC |
| | | CRLHTVRASLEDLGWADWVLSPREVQVTMCIGACPSQFRAANMHAQIKTSLHRLKPDTVP |
| | | APCCVPASYNPMVLIQKTDTGVSLQTYDDLLAKDCHCI |
| Dh2CpmFc(+)(N297G) | 245 | PSVFLFPPKPKDTLMISRTPEVTCVVVDVSHEDPEVKFNWYVDGVEVHNAKTKPREEQYG |
| | | STYRVVSVLTVLHQDWLNGKEYKCKVSNKALPAPIEKTISKAKGQPREPQVYTLPPSRKE |
| | | MTKNQVSLTCLVKGFYPSDIAVEWESNGQPENNYKTTPPVLKSDGSFFLYSKLTVDKSRW |
| | | QQGNVFSCSVMHEALHNHYTQKSLSLSPGK |
| Dh2CpmFc(−) | 246 | PSVFLFPPKPKDTLMISRTPEVTCVVVDVSHEDPEVKFNWYVDGVEVHNAKTKPREEQYG |
| (N297G)- | | STYRVVSVLTVLHQDWLNGKEYKCKVSNKALPAPIEKTISKAKGQPREPQVYTLPPSREE |
| GDF15(Ndel3) | | MTKNQVSLTCLVKGFYPSDIAVEWESNGQPENNYDTTPPVLDSDGSFFLYSDLTVDKSRW |
| | | QQGNVFSCSVMHEALHNHYTQKSLSLSPGGDHCPLGPGRCCRLHTVRASLEDLGWADWVL |
| | | SPREVQVTMCIGACPSQFRAANMHAQIKTSLHRLKPDTVPAPCCVPASYNPMVLIQKTDT |
| | | GVSLQTYDDLLAKDCHCI |
| Dh2CpmFc(−) | 247 | PSVFLFPPKPKDTLMISRTPEVTCVVVDVSHEDPEVKFNWYVDGVEVHNAKTKPREEQYG |
| (N297G) | | STYRVVSVLTVLHQDWLNGKEYKCKVSNKALPAPIEKTISKAKGQPREPQVYTLPPSREE |
| | | MTKNQVSLTCLVKGFYPSDIAVEWESNGQPENNYDTTPPVLDSDGSFFLYSDLTVDKSRW |
| | | QQGNVFSCSVMHEALHNHYTQKSLSLSPG |
| Dh2CpmFc(+) | 248 | PSVFLFPPKPKDTLMISRTPEVTCVVVDVSHEDPEVKFNWYVDGVEVHNAKTKPREEQYG |
| (N297G) | | STYRVVSVLTVLHQDWLNGKEYKCKVSNKALPAPIEKTISKAKGQPREPQVYTLPPSRKE |
| | | MTKNQVSLTCLVKGFYPSDIAVEWESNGQPENNYKTTPPVLKSDGSFFLYSKLTVDKSRW |
| | | QQGNVFSCSVMHEALHNHYTQKSLSLSPG |
| Dh2CpmFc(−) | 249 | PSVFLFPPKPKDTLMISRTPEVTCVVVDVSHEDPEVKFNWYVDGVEVHNAKTKPREEQYG |
| (N297G)- | | STYRVVSVLTVLHQDWLNGKEYKCKVSNKALPAPIEKTISKAKGQPREPQVYTLPPSREE |
| GDF15(N3D) | | MTKNQVSLTCLVKGFYPSDIAVEWESNGQPENNYDTTPPVLDSDGSFFLYSDLTVDKSRW |
| | | QQGNVFSCSVMHEALHNHYTQKSLSLSPGARDGDHCPLGPGRCCRLHTVRASLEDLGWAD |
| | | WVLSPREVQVTMCIGACPSQFRAANMHAQIKTSLHRLKPDTVPAPCCVPASYNPMVLIQK |
| | | TDTGVSLQTYDDLLAKDCHCI |
| Dh2CpmFc(+) | 250 | PSVFLFPPKPKDTLMISRTPEVTCVVVDVSHEDPEVKFNWYVDGVEVHNAKTKPREEQYG |
| (N297G)(S354C) | | STYRVVSVLTVLHQDWLNGKEYKCKVSNKALPAPIEKTISKAKGQPREPQVYTLPPCRKE |
| | | MTKNQVSLTCLVKGFYPSDIAVEWESNGQPENNYKTTPPVLKSDGSFFLYSKLTVDKSRW |
| | | QQGNVFSCSVMHEALHNHYTQKSLSLSPGK |
| Dh2CpmFc(−) | 251 | PSVFLFPPKPKDTLMISRTPEVTCVVVDVSHEDPEVKFNWYVDGVEVHNAKTKPREEQYG |
| (N297G)(Y349C)- | | STYRVVSVLTVLHQDWLNGKEYKCKVSNKALPAPIEKTISKAKGQPREPQVCTLPPSREE |
| GDF15(Ndel3) | | MTKNQVSLTCLVKGFYPSDIAVEWESNGQPENNYDTTPPVLDSDGSFFLYSDLTVDKSRW |
| | | QQGNVFSCSVMHEALHNHYTQKSLSLSPGGDHCPLGPGRCCRLHTVRASLEDLGWADWVL |
| | | SPREVQVTMCIGACPSQFRAANMHAQIKTSLHRLKPDTVPAPCCVPASYNPMVLIQKTDT |
| | | GVSLQTYDDLLAKDCHCI |
| Dh2CpmFc(−) | 252 | PSVFLFPPKPKDTLMISRTPEVTCVVVDVSHEDPEVKFNWYVDGVEVHNAKTKPREEQYG |
| (N297G)(Y349C) | | STYRVVSVLTVLHQDWLNGKEYKCKVSNKALPAPIEKTISKAKGQPREPQVCTLPPSREE |
| | | MTKNQVSLTCLVKGFYPSDIAVEWESNGQPENNYDTTPPVLDSDGSFFLYSDLTVDKSRW |
| | | QQGNVFSCSVMHEALHNHYTQKSLSLSPG |
| Dh2CpmFc(+) | 253 | PSVFLFPPKPKDTLMISRTPEVTCVVVDVSHEDPEVKFNWYVDGVEVHNAKTKPREEQYG |
| (N297G)(S354C) | | STYRVVSVLTVLHQDWLNGKEYKCKVSNKALPAPIEKTISKAKGQPREPQVYTLPPCRKE |
| | | MTKNQVSLTCLVKGFYPSDIAVEWESNGQPENNYKTTPPVLKSDGSFFLYSKLTVDKSRW |
| | | QQGNVFSCSVMHEALHNHYTQKSLSLSPG |
| Dh2CpmFc(−) | 254 | PSVFLFPPKPKDTLMISRTPEVTCVVVDVSHEDPEVKFNWYVDGVEVHNAKTKPREEQYG |
| (N297G)(Y349C)- | | STYRVVSVLTVLHQDWLNGKEYKCKVSNKALPAPIEKTISKAKGQPREPQVCTLPPSREE |
| GDF15(N3D) | | MTKNQVSLTCLVKGFYPSDIAVEWESNGQPENNYDTTPPVLDSDGSFFLYSDLTVDKSRW |
| | | QQGNVFSCSVMHEALHNHYTQKSLSLSPGARDGDHCPLGPGRCCRLHTVRASLEDLGWAD |
| | | WVLSPREVQVTMCIGACPSQFRAANMHAQIKTSLHRLKPDTVPAPCCVPASYNPMVLIQK |
| | | TDTGVSLQTYDDLLAKDCHCI |
| Dh2CpmFc(+) | 255 | PSVFLFPPKPKDTLMISRTPEVTCVVVDVSHEDPEVKFNWYVDGVEVHNCKTKPREEQYG |
| (N297G)(L306C) | | TYRVVSVCTVLHQDWLNGKEYKCKVSNKALPAPIEKTISKAKGQPREPQVYTLPPSRKE |
| | | MTKNQVSLTCLVKGFYPSDIAVEWESNGQPENNYKTTPPVLKSDGSFFLYSKLTVDKSRW |
| | | QQGNVFSCSVMHEALHNHYTQKSLSLSPGK |
| Dh2CpmFc(−) | 256 | PSVFLFPPKPKDTLMISRTPEVTCVVVDVSHEDPEVKFNWYVDGVEVHNCKTKPREEQYG |
| (N297G)(A287C)- | | STYRVVSVCTVLHQDWLNGKEYKCKVSNKALPAPIEKTISKAKGQPREPQVYTLPPSREE |
| GDF15(Ndel3) | | MTKNQVSLTCLVKGFYPSDIAVEWESNGQPENNYDTTPPVLDSDGSFFLYSDLTVDKSRW |
| | | QQGNVFSCSVMHEALHNHYTQKSLSLSPGGDHCPLGPGRCCRLHTVRASLEDLGWADWVL |
| | | SPREVQVTMCIGACPSQFRAANMHAQIKTSLHRLKPDTVPAPCCVPASYNPMVLIQKTDT |
| | | GVSLQTYDDLLAKDCHCI |
| Dh2CpmFc(−) | 257 | PSVFLFPPKPKDTLMISRTPEVTCVVVDVSHEDPEVKFNWYVDGVEVHNCKTKPREEQYG |
| (N297G)(A287C) | | STYRVVSVCTVLHQDWLNGKEYKCKVSNKALPAPIEKTISKAKGQPREPQVYTLPPSREE |
| | | MTKNQVSLTCLVKGFYPSDIAVEWESNGQPENNYDTTPPVLDSDGSFFLYSDLTVDKSRW |
| | | QQGNVFSCSVMHEALHNHYTQKSLSLSPG |
| Dh2CpmFc(+) | 258 | PSVFLFPPKPKDTLMISRTPEVTCVVVDVSHEDPEVKFNWYVDGVEVHNCKTKPREEQYG |
| (N297G)(L306C) | | STYRVVSVCTVLHQDWLNGKEYKCKVSNKALPAPIEKTISKAKGQPREPQVYTLPPSRKE |
| | | MTKNQVSLTCLVKGFYPSDIAVEWESNGQPENNYKTTPPVLKSDGSFFLYSKLTVDKSRW |
| | | QQGNVFSCSVMHEALHNHYTQKSLSLSPG |
| Dh2CpmFc(−) | 259 | PSVFLFPPKPKDTLMISRTPEVTCVVVDVSHEDPEVKFNWYVDGVEVHNCKTKPREEQYG |
| (N297G)(A287C)- | | STYRVVSVCTVLHQDWLNGKEYKCKVSNKALPAPIEKTISKAKGQPREPQVYTLPPSREE |
| GDF15(N3D) | | MTKNQVSLTCLVKGFYPSDIAVEWESNGQPENNYDTTPPVLDSDGSFFLYSDLTVDKSRW |
| | | QQGNVFSCSVMHEALHNHYTQKSLSLSPGARDGDHCPLGPGRCCRLHTVRASLEDLGWAD |
| | | WVLSPREVQVTMCIGACPSQFRAANMHAQIKTSLHRLKPDTVPAPCCVPASYNPMVLIQK |
| | | TDTGVSLQTYDDLLAKDCHCI |
| Dh2CpmFc(+) | 260 | PSVFLFPPKPKDTLMISRTPEVTCVVVDVSHEDPEVKFNWYVDGVEVHNCKTKPREEQYG |
| (N297G)(L306C) | | STYRVVSVCTVLHQDWLNGKEYKCKVSNKALPAPIEKTISKAKGQPREPQVYTLPPCRKE |
| (S354C) | | MTKNQVSLTCLVKGFYPSDIAVEWESNGQPENNYKTTPPVLKSDGSFFLYSKLTVDKSRW |
| | | QQGNVFSCSVMHEALHNHYTQKSLSLSPGK |
| Dh2CpmFc(−) | 261 | PSVFLFPPKPKDTLMISRTPEVTCVVVDVSHEDPEVKFNWYVDGVEVHNCKTKPREEQYG |
| (N297G)(A287C) | | STYRVVSVCTVLHQDWLNGKEYKCKVSNKALPAPIEKTISKAKGQPREPQVCTLPPSREE |
| (Y349C)- | | MTKNQVSLTCLVKGFYPSDIAVEWESNGQPENNYDTTPPVLDSDGSFFLYSDLTVDKSRW |
| GDF15(Ndel3) | | QQGNVFSCSVMHEALHNHYTQKSLSLSPGGDHCPLGPGRCCRLHTVRASLEDLGWADWVL |
| | | SPREVQVTMCIGACPSQFRAANMHAQIKTSLHRLKPDTVPAPCCVPASYNPMVLIQKTDT |
| | | GVSLQTYDDLLAKDCHCI |
| Dh2CpmFc(−) | 262 | PSVFLFPPKPKDTLMISRTPEVTCVVVDVSHEDPEVKFNWYVDGVEVHNCKTKPREEQYG |
| (N297G)(A287C) | | STYRVVSVCTVLHQDWLNGKEYKCKVSNKALPAPIEKTISKAKGQPREPQVCTLPPSREE |
| (Y349C) | | MTKNQVSLTCLVKGFYPSDIAVEWESNGQPENNYDTTPPVLDSDGSFFLYSDLTVDKSRW |
| | | QQGNVFSCSVMHEALHNHYTQKSLSLSPG |
| Dh2CpmFc(+) | 263 | PSVFLFPPKPKDTLMISRTPEVTCVVVDVSHEDPEVKFNWYVDGVEVHNCKTKPREEQYG |
| (N297G)(L306C) | | STYRVVSVCTVLHQDWLNGKEYKCKVSNKALPAPIEKTISKAKGQPREPQVYTLPPCRKE |
| (S354C) | | MTKNQVSLTCLVKGFYPSDIAVEWESNGQPENNYKTTPPVLKSDGSFFLYSKLTVDKSRW |
| | | QQGNVFSCSVMHEALHNHYTQKSLSLSPG |
| Dh2CpmFc(−) | 264 | PSVFLFPPKPKDTLMISRTPEVTCVVVDVSHEDPEVKFNWYVDGVEVHNCKTKPREEQYG |
| (N297G)(A287C) | | STYRVVSVCTVLHQDWLNGKEYKCKVSNKALPAPIEKTISKAKGQPREPQVCTLPPSREE |
| (Y349C)- | | MTKNQVSLTCLVKGFYPSDIAVEWESNGQPENNYDTTPPVLDSDGSFFLYSDLTVDKSRW |
| GDF15(N3D) | | QQGNVFSCSVMHEALHNHYTQKSLSLSPGARDGDHCPLGPGRCCRLHTVRASLEDLGWAD |
| | | WVLSPREVQVTMCIGACPSQFRAANMHAQIKTSLHRLKPDTVPAPCCVPASYNPMVLIQK |
| | | TDTGVSLQTYDDLLAKDCHCI |
| GG- | 265 | GGPSVFLFPPKPKDTLMISRTPEVTCVVVDVSHEDPEVKFNWYVDGVEVHNAKTKPREEQ |
| Dh2CpmFc(+) | | YNSTYRVVSVLTVLHQDWLNGKEYKCKVSNKALPAPIEKTISKAKGQPREPQVYTLPPSR |
| | | KEMTKNQVSLTCLVKGFYPSDIAVEWESNGQPENNYKTTPPVLKSDGSFFLYSKLTVDKS |
| | | RWQQGNVFSCSVMHEALHNHYTQKSLSLSPGK |
| GG- | 266 | MEWSWVFLFFLSVTTGVHSGGPSVFLFPPKPKDTLMISRTPEVTCVVVDVSHEDPEVKFN |
| Dh2CpmFc(+) | | WYVDGVEVHNAKTKPREEQYNSTYRVVSVLTVLHQDWLNGKEYKCKVSNKALPAPIEKTI |
| with VH21 | | SKAKGQPREPQVYTLPPSRKEMTKNQVSLTCLVKGFYPSDIAVEWESNGQPENNYKTTPP |
| signal | | VLKSDGSFFLYSKLTVDKSRWQQGNVFSCSVMHEALHNHYTQKSLSLSPGK |
| sequence | | |
| GG- | 267 | GGPSVFLFPPKPKDTLMISRTPEVTCVVVDVSHEDPEVKFNWYVDGVEVHNAKTKPREEQ |
| Dh2CpmFc(−)- | | YNSTYRVVSVLTVLHQDWLNGKEYKCKVSNKALPAPIEKTISKAKGQPREPQVYTLPPSR |
| GDF15(Ndel3) | | EEMTKNQVSLTCLVKGFYPSDIAVEWESNGQPENNYDTTPPVLDSDGSFFLYSDLTVDKS |
| | | RWQQGNVFSCSVMHEALHNHYTQKSLSLSPGGDHCPLGPGRCCRLHTVRASLEDLGWADW |
| | | VLSPREVQVTMCIGACPSQFRAANMHAQIKTSLHRLKPDTVPAPCCVPASYNPMVLIQKT |
| | | DTGVSLQTYDDLLAKDCHCI |
| GG- | 268 | MEWSWVFLFFLSVTTGVHSGGPSVFLFPPKPKDTLMISRTPEVTCVVVDVSHEDPEVKFN |
| Dh2CpmFc(−)- | | WYVDGVEVHNAKTKPREEQYNSTYRVVSVLTVLHQDWLNGKEYKCKVSNKALPAPIEKTI |
| GDF15(Ndel3) | | SKAKGQPREPQVYTLPPSREEMTKNQVSLTCLVKGFYPSDIAVEWESNGQPENNYDTTPP |
| with VH21 | | VLDSDGSFFLYSDLTVDKSRWQQGNVFSCSVMHEALHNHYTQKSLSLSPGGDHCPLGPGR |
| signal | | CCRLHTVRASLEDLGWADWVLSPREVQVTMCIGACPSQFRAANMHAQIKTSLHRLKPDTV |
| sequence | | PAPCCVPASYNPMVLIQKTDTGVSLQTYDDLLAKDCHCI |
| GG- | 269 | GGPSVFLFPPKPKDTLMISRTPEVTCVVVDVSHEDPEVKFNWYVDGVEVHNAKTKPREEQ |
| Dh2CpmFc(−) | | YNSTYRVVSVLTVLHQDWLNGKEYKCKVSNKALPAPIEKTISKAKGQPREPQVYTLPPSR |
| | | EEMTKNQVSLTCLVKGFYPSDIAVEWESNGQPENNYDTTPPVLDSDGSFFLYSDLTVDKS |
| | | RWQQGNVFSCSVMHEALHNHYTQKSLSLSPG |
| GG- | 270 | GGPSVFLFPPKPKDTLMISRTPEVTCVVVDVSHEDPEVKFNWYVDGVEVHNAKTKPREEQ |
| Dh2CpmFc(+) | | YNSTYRVVSVLTVLHQDWLNGKEYKCKVSNKALPAPIEKTISKAKGQPREPQVYTLPPSR |
| | | KEMTKNQVSLTCLVKGFYPSDIAVEWESNGQPENNYKTTPPVLKSDGSFFLYSKLTVDKS |
| | | RWQQGNVFSCSVMHEALHNHYTQKSLSLSPG |
| GG- | 271 | GGPSVFLFPPKPKDTLMISRTPEVTCVVVDVSHEDPEVKFNWYVDGVEVHNAKTKPREEQ |
| Dh2CpmFc(−)- | | YNSTYRVVSVLTVLHQDWLNGKEYKCKVSNKALPAPIEKTISKAKGQPREPQVYTLPPSR |
| GDF15(N3D) | | EEMTKNQVSLTCLVKGFYPSDIAVEWESNGQPENNYDTTPPVLDSDGSFFLYSDLTVDKS |
| | | RWQQGNVFSCSVMHEALHNHYTQKSLSLSPGARDGDHCPLGPGRCCRLHTVRASLEDLGW |
| | | ADWVLSPREVQVTMCIGACPSQFRAANMHAQIKTSLHRLKPDTVPAPCCVPASYNPMVLI |
| | | QKTDTGVSLQTYDDLLAKDCHCI |
| GG- | 272 | MEWSWVFLFFLSVTTGVHSGGPSVFLFPPKPKDTLMISRTPEVTCVVVDVSHEDPEVKFN |
| Dh2CpmFc(−)- | | WYVDGVEVHNAKTKPREEQYNSTYRVVSVLTVLHQDWLNGKEYKCKVSNKALPAPIEKTI |
| GDF15(N3D) | | SKAKGQPREPQVYTLPPSREEMTKNQVSLTCLVKGFYPSDIAVEWESNGQPENNYDTTPP |
| with VH21 | | VLDSDGSFFLYSDLTVDKSRWQQGNVFSCSVMHEALHNHYTQKSLSLSPGARDGDHCPLG |
| signal | | PGRCCRLHTVRASLEDLGWADWVLSPREVQVTMCIGACPSQFRAANMHAQIKTSLHRLKP |
| sequence | | DTVPAPCCVPASYNPMVLIQKTDTGVSLQTYDDLLAKDCHCI |
| GG- | 273 | GGPSVFLFPPKPKDTLMISRTPEVTCVVVDVSHEDPEVKFNWYVDGVEVHNAKTKPREEQ |
| Dh2CpmFc(+) | | YNSTYRVVSVLTVLHQDWLNGKEYKCKVSNKALPAPIEKTISKAKGQPREPQVYTLPPCR |
| (S354C) | | KEMTKNQVSLTCLVKGFYPSDIAVEWESNGQPENNYKTTPPVLKSDGSFFLYSKLTVDKS |
| | | RWQQGNVFSCSVMHEALHNHYTQKSLSLSPGK |
| GG- | 274 | MEWSWVFLFFLSVTTGVHSGGPSVFLFPPKPKDTLMISRTPEVTCVVVDVSHEDPEVKFN |
| Dh2CpmFc(+) | | WYVDGVEVHNAKTKPREEQYNSTYRVVSVLTVLHQDWLNGKEYKCKVSNKALPAPIEKTI |
| (S354C) with | | SKAKGQPREPQVYTLPPCRKEMTKNQVSLTCLVKGFYPSDIAVEWESNGQPENNYKTTPP |
| VH21 signal | | VLKSDGSFFLYSKLTVDKSRWQQGNVFSCSVMHEALHNHYTQKSLSLSPGK |
| sequence | | |
| GG- | 275 | GGPSVFLFPPKPKDTLMISRTPEVTCVVVDVSHEDPEVKFNWYVDGVEVHNAKTKPREEQ |
| Dh2CpmFc(−) | | YNSTYRVVSVLTVLHQDWLNGKEYKCKVSNKALPAPIEKTISKAKGQPREPQVCTLPPSR |
| (Y349C)- | | EEMTKNQVSLTCLVKGFYPSDIAVEWESNGQPENNYDTTPPVLDSDGSFFLYSDLTVDKS |
| GDF15(Ndel3) | | RWQQGNVFSCSVMHEALHNHYTQKSLSLSPGGDHCPLGPGRCCRLHTVRASLEDLGWADW |
| | | VLSPREVQVTMCIGACPSQFRAANMHAQIKTSLHRLKPDTVPAPCCVPASYNPMVLIQKT |
| | | DTGVSLQTYDDLLAKDCHCI |
| GG- | 276 | MEWSWVFLFFLSVTTGVHSGGPSVFLFPPKPKDTLMISRTPEVTCVVVDVSHEDPEVKFN |
| Dh2CpmFc(−) | | WYVDGVEVHNAKTKPREEQYNSTYRVVSVLTVLHQDWLNGKEYKCKVSNKALPAPIEKTI |
| (Y349C)- | | SKAKGQPREPQVCTLPPSREEMTKNQVSLTCLVKGFYPSDIAVEWESNGQPENNYDTTPP |
| GDF15(Ndel3) | | VLDSDGSFFLYSDLTVDKSRWQQGNVFSCSVMHEALHNHYTQKSLSLSPGGDHCPLGPGR |
| with VH21 | | CCRLHTVRASLEDLGWADWVLSPREVQVTMCIGACPSQFRAANMHAQIKTSLHRLKPDTV |
| signal | | PAPCCVPASYNPMVLIQKTDTGVSLQTYDDLLAKDCHCI |
| sequence | | |
| GG- | 277 | GGPSVFLFPPKPKDTLMISRTPEVTCVVVDVSHEDPEVKFNWYVDGVEVHNAKTKPREEQ |
| Dh2CpmFc(−) | | YNSTYRVVSVLTVLHQDWLNGKEYKCKVSNKALPAPIEKTISKAKGQPREPQVCTLPPSR |
| (Y349C) | | EEMTKNQVSLTCLVKGFYPSDIAVEWESNGQPENNYDTTPPVLDSDGSFFLYSDLTVDKS |
| | | RWQQGNVFSCSVMHEALHNHYTQKSLSLSPG |
| GG- | 278 | GGPSVFLFPPKPKDTLMISRTPEVTCVVVDVSHEDPEVKFNWYVDGVEVHNAKTKPREEQ |
| Dh2CpmFc(+) | | YNSTYRVVSVLTVLHQDWLNGKEYKCKVSNKALPAPIEKTISKAKGQPREPQVYTLPPCR |
| (S354C) | | KEMTKNQVSLTCLVKGFYPSDIAVEWESNGQPENNYKTTPPVLKSDGSFFLYSKLTVDKS |
| | | RWQQGNVFSCSVMHEALHNHYTQKSLSLSPG |
| GG- | 279 | GGPSVFLFPPKPKDTLMISRTPEVTCVVVDVSHEDPEVKFNWYVDGVEVHNAKTKPREEQ |
| Dh2CpmFc(−) | | YNSTYRVVSVLTVLHQDWLNGKEYKCKVSNKALPAPIEKTISKAKGQPREPQVCTLPPSR |
| (Y349C)- | | EEMTKNQVSLTCLVKGFYPSDIAVEWESNGQPENNYDTTPPVLDSDGSFFLYSDLTVDKS |
| GDF15(N3D) | | RWQQGNVFSCSVMHEALHNHYTQKSLSLSPGARDGDHCPLGPGRCCRLHTVRASLEDLGW |
| | | ADWVLSPREVQVTMCIGACPSQFRAANMHAQIKTSLHRLKPDTVPAPCCVPASYNPMVLI |
| | | QKTDTGVSLQTYDDLLAKDCHCI |
| GG- | 280 | MEWSWVFLFFLSVTTGVHSGGPSVFLFPPKPKDTLMISRTPEVTCVVVDVSHEDPEVKFN |
| Dh2CpmFc(−) | | WYVDGVEVHNAKTKPREEQYNSTYRVVSVLTVLHQDWLNGKEYKCKVSNKALPAPIEKTI |
| (Y349C)- | | SKAKGQPREPQVCTLPPSREEMTKNQVSLTCLVKGFYPSDIAVEWESNGQPENNYDTTPP |
| GDF15(N3D) | | VLDSDGSFFLYSDLTVDKSRWQQGNVFSCSVMHEALHNHYTQKSLSLSPGARDGDHCPLG |
| with VH21 | | PGRCCRLHTVRASLEDLGWADWVLSPREVQVTMCIGACPSQFRAANMHAQIKTSLHRLKP |
| signal | | DTVPAPCCVPASYNPMVLIQKTDTGVSLQTYDDLLAKDCHCI |
| sequence | | |
| Dh3CpmFc(+) | 281 | GPSVFLFPPKPKDTLMISRTPEVTCVVVDVSHEDPEVKFNWYVDGVEVHNAKTKPREEQY |
| | | NSTYRVVSVLTVLHQDWLNGKEYKCKVSNKALPAPIEKTISKAKGQPREPQVYTLPPSRK |
| | | EMTKNQVSLTCLVKGFYPSDIAVEWESNGQPENNYKTTPPVLKSDGSFFLYSKLTVDKSR |
| | | WQQGNVFSCSVMHEALHNHYTQKSLSLSPGK |
| Dh3CpmFc(+) | 282 | MDMRVPAQLLGLLLLWLRGARCGPSVFLFPPKPKDTLMISRTPEVTCVVVDVSHEDPEVK |
| with VH21 | | FNWYVDGVEVHNAKTKPREEQYNSTYRVVSVLTVLHQDWLNGKEYKCKVSNKALPAPIEK |
| signal | | TISKAKGQPREPQVYTLPPSRKEMTKNQVSLTCLVKGFYPSDIAVEWESNGQPENNYKTT |
| sequence | | PPVLKSDGSFFLYSKLTVDKSRWQQGNVFSCSVMHEALHNHYTQKSLSLSPGK |
| Dh3CpmFc(−)- | 283 | GPSVFLFPPKPKDTLMISRTPEVTCVVVDVSHEDPEVKFNWYVDGVEVHNAKTKPREEQY |
| GDF15(Ndel3) | | NSTYRVVSVLTVLHQDWLNGKEYKCKVSNKALPAPIEKTISKAKGQPREPQVYTLPPSRE |
| | | EMTKNQVSLTCLVKGFYPSDIAVEWESNGQPENNYDTTPPVLDSDGSFFLYSDLTVDKSR |
| | | WQQGNVFSCSVMHEALHNHYTQKSLSLSPGGDHCPLGPGRCCRLHTVRASLEDLGWADWV |
| | | LSPREVQVTMCIGACPSQFRAANMHAQIKTSLHRLKPDTVPAPCCVPASYNPMVLIQKTD |
| | | TGVSLQTYDDLLAKDCHCI |
| Dh3CpmFc(−)- | 284 | MDMRVPAQLLGLLLLWLRGARCGPSVFLFPPKPKDTLMISRTPEVTCVVVDVSHEDPEVK |
| GDF15(Ndel3) | | FNWYVDGVEVHNAKTKPREEQYNSTYRVVSVLTVLHQDWLNGKEYKCKVSNKALPAPIEK |
| with VH21 | | TISKAKGQPREPQVYTLPPSREEMTKNQVSLTCLVKGFYPSDIAVEWESNGQPENNYDTT |
| signal | | PPVLDSDGSFFLYSDLTVDKSRWQQGNVFSCSVMHEALHNHYTQKSLSLSPGGDHCPLGP |
| sequence | | GRCCRLHTVRASLEDLGWADWVLSPREVQVTMCIGACPSQFRAANMHAQIKTSLHRLKPD |
| | | TVPAPCCVPASYNPMVLIQKTDTGVSLQTYDDLLAKDCHCI |
| Dh3CpmFc(−) | 285 | GPSVFLFPPKPKDTLMISRTPEVTCVVVDVSHEDPEVKFNWYVDGVEVHNAKTKPREEQY |
| | | NSTYRVVSVLTVLHQDWLNGKEYKCKVSNKALPAPIEKTISKAKGQPREPQVYTLPPSRE |
| | | EMTKNQVSLTCLVKGFYPSDIAVEWESNGQPENNYDTTPPVLDSDGSFFLYSDLTVDKSR |
| | | WQQGNVFSCSVMHEALHNHYTQKSLSLSPG |
| Dh3CpmFc(+) | 286 | GPSVFLFPPKPKDTLMISRTPEVTCVVVDVSHEDPEVKFNWYVDGVEVHNAKTKPREEQY |
| | | NSTYRVVSVLTVLHQDWLNGKEYKCKVSNKALPAPIEKTISKAKGQPREPQVYTLPPSRK |
| | | EMTKNQVSLTCLVKGFYPSDIAVEWESNGQPENNYKTTPPVLKSDGSFFLYSKLTVDKSR |
| | | WQQGNVFSCSVMHEALHNHYTQKSLSLSPG |
| Dh3CpmFc(−)- | 287 | GPSVFLFPPKPKDTLMISRTPEVTCVVVDVSHEDPEVKFNWYVDGVEVHNAKTKPREEQY |
| GDF15(N3D) | | NSTYRVVSVLTVLHQDWLNGKEYKCKVSNKALPAPIEKTISKAKGQPREPQVYTLPPSRE |
| | | EMTKNQVSLTCLVKGFYPSDIAVEWESNGQPENNYDTTPPVLDSDGSFFLYSDLTVDKSR |
| | | WQQGNVFSCSVMHEALHNHYTQKSLSLSPGARDGDHCPLGPGRCCRLHTVRASLEDLGWA |
| | | DWVLSPREVQVTMCIGACPSQFRAANMHAQIKTSLHRLKPDTVPAPCCVPASYNPMVLIQ |
| | | KTDTGVSLQTYDDLLAKDCHCI |
| Dh3CpmFc(−)- | 288 | MDMRVPAQLLGLLLLWLRGARCGPSVFLFPPKPKDTLMISRTPEVTCVVVDVSHEDPEVK |
| GDF15(N3D) | | FNWYVDGVEVHNAKTKPREEQYNSTYRVVSVLTVLHQDWLNGKEYKCKVSNKALPAPIEK |
| with VH21 | | TISKAKGQPREPQVYTLPPSREEMTKNQVSLTCLVKGFYPSDIAVEWESNGQPENNYDTT |
| signal | | PPVLDSDGSFFLYSDLTVDKSRWQQGNVFSCSVMHEALHNHYTQKSLSLSPGARDGDHCP |
| sequence | | LGPGRCCRLHTVRASLEDLGWADWVLSPREVQVTMCIGACPSQFRAANMHAQIKTSLHRL |
| | | KPDTVPAPCCVPASYNPMVLIQKTDTGVSLQTYDDLLAKDCHCI |
| Dh3CpmFc(+) | 289 | GPSVFLFPPKPKDTLMISRTPEVTCVVVDVSHEDPEVKFNWYVDGVEVHNAKTKPREEQY |
| (S354C) | | NSTYRVVSVLTVLHQDWLNGKEYKCKVSNKALPAPIEKTISKAKGQPREPQVYTLPPCRK |
| | | EMTKNQVSLTCLVKGFYPSDIAVEWESNGQPENNYKTTPPVLKSDGSFFLYSKLTVDKSR |
| | | WQQGNVFSCSVMHEALHNHYTQKSLSLSPGK |
| Dh3CpmFc(+) | 290 | MDMRVPAQLLGLLLLWLRGARCGPSVFLFPPKPKDTLMISRTPEVTCVVVDVSHEDPEVK |
| (S354C) with | | FNWYVDGVEVHNAKTKPREEQYNSTYRVVSVLTVLHQDWLNGKEYKCKVSNKALPAPIEK |
| VH21 signal | | TISKAKGQPREPQVYTLPPCRKEMTKNQVSLTCLVKGFYPSDIAVEWESNGQPENNYKTT |
| sequence | | PPVLKSDGSFFLYSKLTVDKSRWQQGNVFSCSVMHEALHNHYTQKSLSLSPGK |
| Dh3CpmFc(−) | 291 | GPSVFLFPPKPKDTLMISRTPEVTCVVVDVSHEDPEVKFNWYVDGVEVHNAKTKPREEQY |
| (Y349C)- | | NSTYRVVSVLTVLHQDWLNGKEYKCKVSNKALPAPIEKTISKAKGQPREPQVCTLPPSRE |
| GDF15(Ndel3) | | EMTKNQVSLTCLVKGFYPSDIAVEWESNGQPENNYDTTPPVLDSDGSFFLYSDLTVDKSR |
| | | WQQGNVFSCSVMHEALHNHYTQKSLSLSPGGDHCPLGPGRCCRLHTVRASLEDLGWADWV |
| | | LSPREVQVTMCIGACPSQFRAANMHAQIKTSLHRLKPDTVPAPCCVPASYNPMVLIQKTD |
| | | TGVSLQTYDDLLAKDCHCI |
| Dh3CpmFc(−) | 292 | MDMRVPAQLLGLLLLWLRGARCGPSVFLFPPKPKDTLMISRTPEVTCVVVDVSHEDPEVK |
| (Y349C)- | | FNWYVDGVEVHNAKTKPREEQYNSTYRVVSVLTVLHQDWLNGKEYKCKVSNKALPAPIEK |
| GDF15(Ndel3) | | TISKAKGQPREPQVCTLPPSREEMTKNQVSLTCLVKGFYPSDIAVEWESNGQPENNYDTT |
| with VH21 | | PPVLDSDGSFFLYSDLTVDKSRWQQGNVFSCSVMHEALHNHYTQKSLSLSPGGDHCPLGP |
| signal | | GRCCRLHTVRASLEDLGWADWVLSPREVQVTMCIGACPSQFRAANMHAQIKTSLHRLKPD |
| sequence | | TVPAPCCVPASYNPMVLIQKTDTGVSLQTYDDLLAKDCHCI |
| Dh3CpmFc(−) | 293 | GPSVFLFPPKPKDTLMISRTPEVTCVVVDVSHEDPEVKFNWYVDGVEVHNAKTKPREEQY |
| (Y349C) | | NSTYRVVSVLTVLHQDWLNGKEYKCKVSNKALPAPIEKTISKAKGQPREPQVCTLPPSRE |
| | | EMTKNQVSLTCLVKGFYPSDIAVEWESNGQPENNYDTTPPVLDSDGSFFLYSDLTVDKSR |
| | | WQQGNVFSCSVMHEALHNHYTQKSLSLSPG |
| Dh3CpmFc(+) | 294 | GPSVFLFPPKPKDTLMISRTPEVTCVVVDVSHEDPEVKFNWYVDGVEVHNAKTKPREEQY |
| (S354C) | | NSTYRVVSVLTVLHQDWLNGKEYKCKVSNKALPAPIEKTISKAKGQPREPQVYTLPPCRK |
| | | EMTKNQVSLTCLVKGFYPSDIAVEWESNGQPENNYKTTPPVLKSDGSFFLYSKLTVDKSR |
| | | WQQGNVFSCSVMHEALHNHYTQKSLSLSPG |
| Dh3CpmFc(−) | 295 | GPSVFLFPPKPKDTLMISRTPEVTCVVVDVSHEDPEVKFNWYVDGVEVHNAKTKPREEQY |
| (Y349C)- | | NSTYRVVSVLTVLHQDWLNGKEYKCKVSNKALPAPIEKTISKAKGQPREPQVCTLPPSRE |
| GDF15(N3D) | | EMTKNQVSLTCLVKGFYPSDIAVEWESNGQPENNYDTTPPVLDSDGSFFLYSDLTVDKSR |
| | | WQQGNVFSCSVMHEALHNHYTQKSLSLSPGARDGDHCPLGPGRCCRLHTVRASLEDLGWA |
| | | DWVLSPREVQVTMCIGACPSQFRAANMHAQIKTSLHRLKPDTVPAPCCVPASYNPMVLIQ |
| | | KTDTGVSLQTYDDLLAKDCHCI |
| Dh3CpmFc(−) | 296 | MDMRVPAQLLGLLLLWLRGARCGPSVFLFPPKPKDTLMISRTPEVTCVVVDVSHEDPEVK |
| (Y349C)- | | FNWYVDGVEVHNAKTKPREEQYNSTYRVVSVLTVLHQDWLNGKEYKCKVSNKALPAPIEK |
| GDF15(N3D) | | TISKAKGQPREPQVCTLPPSREEMTKNQVSLTCLVKGFYPSDIAVEWESNGQPENNYDTT |
| with VH21 | | PPVLDSDGSFFLYSDLTVDKSRWQQGNVFSCSVMHEALHNHYTQKSLSLSPGARDGDHCP |
| signal | | LGPGRCCRLHTVRASLEDLGWADWVLSPREVQVTMCIGACPSQFRAANMHAQIKTSLHRL |
| sequence | | KPDTVPAPCCVPASYNPMVLIQKTDTGVSLQTYDDLLAKDCHCI |
| Sequence for | 297 | APELLGGPSVFLFPPKPKDTLMISRTPEVTCVVVDVSHEDPEVKFNWYVDGVEVHNAKTK |
| dimer of | | PREEQYGSTYRVVSVLTVLHQDWLNGKEYKCKVSNKALPAPIEKTISKAKGQPREPQVTT |
| DhMonoFc(N297G)- | | LPPSREEMTKNQVSLTCLVKGFYPSDIAVEWESNGQPENNYDTTPPVLDSDGSFFLYSDL |
| GDF15 | | TVDKSRWQQGNVFSCSVMHEALHNHYTQKSLSLSPGARNGDHCPLGPGRCCRLHTVRASL |
| | | EDLGWADWVLSPREVQVTMCIGACPSQFRAANMHAQIKTSLHRLKPDTVPAPCCVPASYN |
| | | PMVLIQKTDTGVSLQTYDDLLAKDCHCI |
| Sequence for | 298 | APELLGGPSVFLFPPKPKDTLMISRTPEVTCVVVDVSHEDPEVKFNWYVDGVEVHNAKTK |
| dimer of | | PREEQYGSTYRVVSVLTVLHQDWLNGKEYKCKVSNKALPAPIEKTISKAKGQPREPQVTT |
| DhMonoFc(N297G)- | | LPPSREEMTKNQVSLTCLVKGFYPSDIAVEWESNGQPENNYDTTPPVLDSDGSFFLYSDL |
| (G4S)4- | | TVDKSRWQQGNVFSCSVMHEALHNHYTQKSLSLSPGGGGGSGGGGSGGGGSGGGGSARNG |
| GDF15 | | DHCPLGPGRCCRLHTVRASLEDLGWADWVLSPREVQVTMCIGACPSQFRAANMHAQIKTS |
| | | LHRLKPDTVPAPCCVPASYNPMVLIQKTDTGVSLQTYDDLLAKDCHCI |
| Sequence for | 299 | APELLGGPSVFLFPPKPKDTLMISRTPEVTCVVVDVSHEDPEVKFNWYVDGVEVHNAKTK |
| dimer of | | PREEQYGSTYRVVSVLTVLHQDWLNGKEYKCKVSNKALPAPIEKTISKAKGQPREPQVTT |
| DhMonoFc(N297G)- | | LPPSREEMTKNQVSLTCLVKGFYPSDIAVEWESNGQPENNYDTTPPVLDSDGSFFLYSDL |
| G4-GDF15 | | TVDKSRWQQGNVFSCSVMHEALHNHYTQKSLSLSPGGGGGARNGDHCPLGPGRCCRLHTV |
| | | RASLEDLGWADWVLSPREVQVTMCIGACPSQFRAANMHAQIKTSLHRLKPDTVPAPCCVP |
| | | ASYNPMVLIQKTDTGVSLQTYDDLLAKDCHCI |
| hGDF15-AHA- | 320 | AHAGDHCPLGPGRCCRLHTVRASLEDLGWADWVLSPREVQVTMCIGACPSQFRAANMHAQI |
| [C(O)PEG2NH] | | KTSLHRLKPDTVPAPCCVPASYNPMVLIQKTDTGVSLQTYDDLLAKDCHCI |
| 2-FA | | |

[0014] In some embodiments, the methods of the invention comprise GDF15 fusion proteins, such as Fc fusions or albumin fusions. Said fusions can comprise wild type GDF15 or variants thereof. In some embodiments, the methods of the present invention comprise polypeptides which can be fused to a heterologous amino acid sequence, optionally via a linker, such as GS (SEQ ID NO: 313) or (GGGGS)n (SEQ ID NO:303), wherein n is one to about 20, and preferably 1, 2, 3 or 4.

[0015] The heterologous amino acid sequence can be an IgG constant domain or fragment thereof (e.g., the Fc region), Human Serum Albumin (HSA), or albumin-binding polypeptides. In some embodiments, the heterologous amino acid sequence is derived from the human IgG4 Fc region because of its reduced ability to bind Fcγ receptors and complement factors compared to other IgG sub-types. Such methods can comprise multimers of said fusion polypeptides. In some embodiments, the methods of the present invention comprise fusion proteins in which the heterologous amino acid sequence (e.g., HSA, Fc, etc.) is fused to the amino-terminal of the GDF15 protein or variants as described herein; in other embodiments, the fusion occurs at the carboxyl-terminal of the GDF15 protein or variants.

[0016] In some embodiments, the methods of the invention comprise GDF15 conjugates, such as GDF15 fatty acid (FA) conjugates, e.g., GDF15 wild type protein (full length, mature, or fragment or truncation thereof) or variant covalently attached to a fatty acid moiety via a linker. In specific embodiments, the methods provided herein comprises administering a GDF15 conjugate or a GDF15 variant conjugate which is not a fatty acid conjugate. In specific embodiments, the methods provided herein comprises administering a GDF15 fatty acid conjugate or a GDF15 variant fatty acid conjugate wherein the fatty acid moiety is not myristic acid and is not a fatty acid according to Formula A1, A2 and A3 as described herein.

[0017] In some embodiments, the methods of the invention comprise GDF15 fusion proteins or conjugates which are covalently linked to one or more polymers, such as polyethylene glycol (PEG) or polysialic acid. The PEG group is attached in such a way so as enhance, and/or not to interfere with, the biological function of the constituent portions of the fusion proteins or conjugates of the invention.

[0018] The invention also provides methods of treatment with a pharmaceutical composition comprising the GDF15 fusion proteins or GDF15 conjugates disclosed herein and a pharmaceutically acceptable formulation agent. Such pharmaceutical compositions can be used in a method for treating one or more of non-alcoholic fatty liver disease (NAFLD) and non-alcoholic steatohepatitis (NASH), as well as end-stage liver disease, hepatic steatosis (fatty liver), liver fibrosis, liver inflammation, liver cirrhosis, primary biliary cirrhosis (PBC), and hepatocellular carcinoma (HCC), and the methods comprise administering to a human patient in need thereof a pharmaceutical composition of the invention.

[0019] The invention also provides methods of treatment with a pharmaceutical composition comprising the GDF15 fusion proteins or GDF15 conjugates disclosed herein and a pharmaceutically acceptable formulation agent. Such pharmaceutical compositions can be used in a method for treating one or more of non-alcoholic fatty liver disease (NAFLD) and non-alcoholic steatohepatitis (NASH), as well as end-stage liver disease, hepatic steatosis (fatty liver), liver fibrosis, liver inflammation, liver cirrhosis, primary biliary cirrhosis (PBC), and hepatocellular carcinoma (HCC), and the methods comprise administering to a human patient in need thereof a pharmaceutical composition of the invention.

[0020] The invention also provides GDF15 fusion proteins or GDF15 conjugates disclosed herein for the treatment of one or more of non-alcoholic fatty liver disease (NAFLD) and non-alcoholic steatohepatitis (NASH), as well as end-stage liver disease, hepatic steatosis (fatty liver), liver fibrosis, liver inflammation, liver cirrhosis, primary biliary cirrhosis (PBC), and hepatocellular carcinoma (HCC). The invention also provides pharmaceutical compositions comprising GDF15 fusion proteins or GDF15 conjugates disclosed herein for the treatment of one or more of non-alcoholic fatty liver disease (NAFLD) and non-alcoholic steatohepatitis (NASH), as well as end-stage liver disease, hepatic steatosis (fatty liver), liver fibrosis, liver inflammation, liver cirrhosis, primary biliary cirrhosis (PBC), and hepatocellular carcinoma (HCC).

[0021] Non-limiting embodiments of the disclosure are described in the following aspects:

[0022] 1. A method of treating non-alcoholic fatty liver disease (NAFLD), non-alcoholic steatohepatitis (NASH), end-stage liver disease, hepatic steatosis (fatty liver), liver fibrosis, liver inflammation, liver cirrhosis, primary biliary cirrhosis (PBC), or hepatocellular carcinoma (HCC) by administering a therapeutically effective amount of a GDF15 therapeutic agent comprising one or more of a GDF15 variant, GDF15 fusion protein, or GDF15 conjugate.

[0023] 2. The method of aspect 1 wherein the GDF15 therapeutic agent is GDF15 conjugate.

[0024] 3. The method of aspect 1 wherein the GDF15 therapeutic agent is an HSA-GDF15 fusion protein or an Fc-GDF15 fusion protein.

[0025] 4. The method of aspect 1 wherein the GDF15 therapeutic agent is selected from Table 1.

[0026] 5. A method of treating non-alcoholic fatty liver disease (NAFLD) or non-alcoholic steatohepatitis (NASH) by administering a therapeutically effective amount of a GDF15 therapeutic agent comprising one or more of a GDF15 protein, variant, mutant, fusion, or conjugate.

[0027] 6. The method of aspect 5 wherein the GDF15 therapeutic agent is a fatty acid-GDF15 conjugate or a PEG-GDF15 conjugate.

[0028] 7. The method of aspect 5 wherein the GDF15 therapeutic agent is an HSA-GDF15 fusion protein or an Fc-GDF15 fusion protein.

[0029] 8. The method of aspect 5 wherein the GDF15 therapeutic agent is selected from Table 1.

[0030] 9. A method of treating non-alcoholic fatty liver disease (NAFLD), non-alcoholic steatohepatitis (NASH), end-stage liver disease, hepatic steatosis (fatty liver), liver fibrosis, liver inflammation, liver cirrhosis, primary biliary cirrhosis (PBC), or hepatocellular carcinoma (HCC) by administering a therapeutically effective amount of a pharmaceutical composition comprising GDF15 therapeutic agent comprising one or more of a GDF15 protein, variant, mutant, fusion, or conjugate.

[0031] 10. The method of aspect 9 wherein the GDF15 therapeutic agent is a fatty acid-GDF15 conjugate or a PEG-GDF15 conjugate.

[0032] 11. The method of aspect 9 wherein the GDF15 therapeutic agent is an HSA-GDF15 fusion protein or an Fc-GDF15 fusion protein.

[0033] 12. The method of aspect 9 wherein the GDF15 therapeutic agent is selected from Table 1.

[0034] 13. A method of treating non-alcoholic fatty liver disease (NAFLD) or non-alcoholic steatohepatitis (NASH) by administering a therapeutically effective amount of a pharmaceutical composition comprising GDF15 therapeutic agent comprising one or more of a GDF15 protein, variant, mutant, fusion, or conjugate.

[0035] 14. The method of aspect 13 wherein the GDF15 therapeutic agent is a fatty acid-GDF15 conjugate or a PEG-GDF15 conjugate.

[0036] 15. The method of aspect 13 wherein the GDF15 therapeutic agent is an HSA-GDF15 fusion protein or an Fc-GDF15 fusion protein.

[0037] 16. The method of aspect 13 wherein the GDF15 therapeutic agent is selected from Table 1.

[0038] 17. The method of any one of aspect 1-16, wherein the GDF15 therapeutic agent does not comprise a GDF15 polypeptide comprising the amino acid sequence of SEQ ID NO: 41.

[0039] 18. The method of any one of aspects 1-17, wherein the GDF15 therapeutic agent is not a fatty acid-GDF15 conjugate comprising the amino acid sequence of SEQ ID NO: 41.

[0040] 19. The method of any one of aspects 1, 2, 4, 5, 6, 8, 9, 10, 12-14 and 16 wherein the GDF15 therapeutic is a fatty acid conjugate which does not comprise the amino sequence of:

(i)
SEQ ID NO: 41;
(ii)

(SEQ ID NO: 321)

MHHHH HHAR NGDHC PLGPG RCCRL HTVRA SLEDL GWADW
VLSPR EVQVT MCIGA CPSQF RAANM HAQIK TSLHR LKPDT
VPAPC CVPAS YNPMV LIQKT DTGVS LQTYD DLLAK DCHCI
(M-(his)₆-hGDF15 (197-308)),
(iii)

(SEQ ID NO: 322)

MHHHHHHMARNGDHCPLGPGRCCRLHTVRASLEDLGWADWVLSPREVQV
TMCIGACPSQFRAANMHAQIKTSLHRLKPDTVPAPCCVPASYNPMVLIQ
KTDTGVSLQTYDDLLAKDCHCI (M-(his)₆-M-hGDF15
(197-308)),
(iv)

(SEQ ID NO: 323)

MHHHHHHAHARDGCPLGEGRCCRLQSLRASLQDLGWANWVVAPRELDVR
MCVGACPSQFRSANTHAQMQARLHGLNPDAAPAPCCVPASYEPVVLMHQ
DSDGRVSLTPFDDLVAKDCHCV (M-(his)₆-dGDF15),
(v)

(SEQ ID NO: 324)

MHNGDHCPLGPGRCCRLHTVRASLEDLGWADWVLSPREVQVTMCIGACP
SQFRAANMHAQIKTSLHRLKPDTVPAPCCVPASYNPMVLIQKTDTGVSL
QTYDDLLAKDCHCI (MH-hGDF15(199-308)),
(vi)

(SEQ ID NO: 325)

MHAGDHCPLGPGRCCRLHTVRASLEDLGWADWVLSPREVQVTMCIGACP
SQFRAANMHAQIKTSLHRLKPDTVPAPCCVPASYNPMVLIQKTDTGVSL
QTYDDLLAKDCHCI (MHA-hGDF15(200-308)),
or
(vii)

(SEQ ID NO: 326)

AHNGDHCPLGPGRCCRLHTVRASLEDLGWADWVLSPREVQVTMCIGACP
SQFRAANMHAQIKTSLHRLKPDTVPAPCCVPASYNPMVLIQKTDTGVSL
QTYDDLLAKDCHCI (AH-hGDF15(199-308)).

[0041] 20. The method of any one of aspects 1-17, wherein the GDF15 therapeutic agent is not albumin-GDF15 fusion comprising the amino acid sequence of SEQ ID NO: 41, such as a human serum albumin-GDF15 fusion.

[0042] 21. The method of any one of aspects 1-16, wherein the GDF15 therapeutic agent comprises the amino acid sequence of any one of the following: SEQ ID NO: 5, SEQ ID NO: 6, SEQ ID NO: 7, SEQ ID NO: 8, SEQ ID NOs: 42-63, SEQ ID NO: 69-107, SEQ ID NO: 148, SEQ ID NO: 149, and SEQ ID NO: 320; or any one of the following: SEQ ID NOs: 42-63, SEQ ID NO: 69-107, SEQ ID NO: 148, SEQ ID NO: 149, and SEQ ID NO: 320.

[0043] 22. The method of any one of aspects 1-16, wherein the GDF15 therapeutic agent does not comprise one of the following amino acid sequences:

(i)

(SEQ ID NO: 321)

MHHHH HHAR NGDHC PLGPG RCCRL HTVRA SLEDL GWADW
VLSPR EVQVT MCIGA CPSQF RAANM HAQIK TSLHR LKPDT
VPAPC CVPAS YNPMV LIQKT DTGVS LQTYD DLLAK DCHCI
(M-(his)₆-hGDF15 (197-308)),
(ii)
SEQ ID NO: 6,
(iii)
SEQ ID NO: 7,
(iv)

(SEQ ID NO: 322)

MHHHHHHMARNGDHCPLGPGRCCRLHTVRASLEDLGWADWVLSPREVQV
TMCIGACPSQFRAANMHAQIKTSLHRLKPDTVPAPCCVPASYNPMVLIQ
KTDTGVSLQTYDDLLAKDCHCI (M-(his)₆-M-hGDF15
(197-308)),
(v)

(SEQ ID NO: 323)

MHHHHHHAHARDGCPLGEGRCCRLQSLRASLQDLGWANWVVAPRELDVR
MCVGACPSQFRSANTHAQMQARLHGLNPDAAPAPCCVPASYEPVVLMHQ
DSDGRVSLTPFDDLVAKDCHCV (M-(his)₆-dGDF15),
(vi)

(SEQ ID NO: 324)

MHNGDHCPLGPGRCCRLHTVRASLEDLGWADWVLSPREVQVTMCIGACP
SQFRAANMHAQIKTSLHRLKPDTVPAPCCVPASYNPMVLIQKTDTGVSL
QTYDDLLAKDCHCI (MH-hGDF15(199-308)),
(vii)

(SEQ ID NO: 325)

MHAGDHCPLGPGRCCRLHTVRASLEDLGWADWVLSPREVQVTMCIGACP
SQFRAANMHAQIKTSLHRLKPDTVPAPCCVPASYNPMVLIQKTDTGVSL
QTYDDLLAKDCHCI (MHA-hGDF15(200-308)),
(viii)
SEQ ID NO: 41,
and
(ix)

(SEQ ID NO: 326)

AHNGDHCPLGPGRCCRLHTVRASLEDLGWADWVLSPREVQVTMCIGACP
SQFRAANMHAQIKTSLHRLKPDTVPAPCCVPASYNPMVLIQKTDTGVSL
QTYDDLLAKDCHCI (AH-hGDF15(199-308)).

[0044] 23. The method of any one of aspects 1, 2, 4, 5, 6, 8, 9, 10, 12-14 and 16, wherein the GDF15 therapeutic agent is a fatty acid-GDF15 conjugate which does not comprise a fatty acid according to any one of Formula A1, A2, and A3:

[chemical structure]

R¹ is CO₂H or H;
R², R³ and R⁴ are independently of each other H, OH, CO₂H, —CH═CH₂ or —C≡CH;
Ak is a branched C₆-C₃₀alkylene;
n, m and p are independently of each other an integer between 6 and 30; and which does not comprise tetradecanoic acid.

[0045] 24. The method of any one of aspects 1, 2, 4, 5, 6, 8, 9, 10, 12-14, 16 and 22, wherein the GDF15 therapeutic agent is a fatty acid-GDF15 conjugate which does not comprise one or more of the following fatty acids:

[chemical structure]

[chemical structure]

[chemical structure]

[chemical structure]

[0046] These and other aspects of the invention will be elucidated in the following detailed description of the invention.

### BRIEF DESCRIPTION OF THE DRAWINGS

[0047] FIGS. 1A-B depict % change in body weight and cumulative food intake, respectively, following the administration of 0.0125 and 0.5 mg/kg of a fatty acid-GDF15 conjugate (6 week study).

[0048] FIGS. 2A-B depict changes in liver weight and hepatic steatosis following the administration of 0.0125 and 0.5 mg/kg of a fatty acid-GDF15 conjugate (6 week study).

[0049] FIG. 3 depicts % change in body weight following the administration of 0.0125 and 0.5 mg/kg of a fatty acid-GDF15 conjugate (16 week study).

[0050] FIGS. 4A-B depict changes in liver weight and heaptic steatosis following the administration of 0.0125 and 0.5 mg/kg of a fatty acid-GDF15 conjugate (16 week study).

### DETAILED DESCRIPTION

[0051] This invention relates to the treatment of non-alcoholic fatty liver disease (NAFLD) and non-alcoholic steatohepatitis (NASH), as well as related conditions that include but are not limited to alcoholic steatohepatitis (ASH), end-stage liver disease, hepatic steatosis (fatty liver), liver fibrosis, liver inflammation, liver cirrhosis, primary biliary cirrhosis (PBC), and hepatocellular carcinoma (HCC), by the administration of GDF15, e.g., variants, conjugates, or fusions of GDF15.

[0052] Growth differentiation factor 15 (GDF15) is a divergent member of the TGFβ superfamily. It is also called macrophage inhibitory cytokine 1 (MIC1) (Bootcov M R, 1997, Proc Natl Acad Sci 94: 11514-9), placental bone morphogenetic factor (PLAB) (Hromas R 1997, Biochim Biophys Acta. 1354:40-4), placental transforming growth factor beta (PTGFB) (Lawton L N 1997, Gene. 203: 17-26), prostate derived factor (PDF) (Paralkar V M 1998, J Biol Chem. 273: 13760-7), and nonsteroidal antiinflammatory drug-activated gene (NAG-1) (Baek S J 2001, J Biol Chem. 276: 33384-92).

[0053] Human GDF15 gene is located on chromosome 19p 13.2-13.1; rat GDF15 gene is located on chromosome 16; and mouse GDF15 gene is located on chromosome 8. The GDF15 open reading frames span two exons (Bottner M 1999, Gene. 237: 105-11 and NCBI). The mature GDF15 peptide shares low homology with other family members (Katoh M 2006, IntJMol Med. 17:951-5.).

[0054] GDF15 is synthesized as a large precursor protein that is cleaved at the dibasic cleavage site to release the carboxyterminal mature peptide. The mouse and rat GDF15 prepro-peptides both contain 303 amino acids. Human full-length precursor contains 308 amino acids. The rodent mature peptides contain 115 amino acids after processing at the RGRR (SEQ ID NO: 1) cleavage site. The human mature peptide contains 112 amino acids after processing at the RGRRRAR (SEQ ID NO:302) cleavage site. Human mature GDF15 peptide shares 66.1 percent and 68.1 percent sequence similarity with rat and mouse mature GDF15 peptides (Bottner M 1999, Gene. 237: 105-11; Bauskin A R 2000, EMBO J. 19:2212-20; NCBI). There is no glycosylation site in the mature GDF15 peptide.

[0055] The mature GDF15 peptide contains the seven conserved cysteine residues required for the formation of the cysteine knot motif (having three intrachain disulfide bonds) and the single interchain disulfide bond that are typical for TGF superfamily members. The mature GDF15 peptide further contains two additional cysteine residues that form a fourth intrachain disulfide bond. Biologically active GDF15 is a 25 KD homodimer of the mature peptide covalently linked by one interchain disulfide bond.

[0056] GDF15 circulating levels have been reported to be elevated in multiple pathological and physiological conditions, most notably pregnancy (Moore A G 2000. J Clin Endocrinol Metab 85: 4781-4788), beta-thalassemia (Tanno T 2007, Nat Med 13: 1096-101) (Zimmermann M B, 2008 Am J Clin Nutr 88: 1026-31), and congenital dyserythropoietic anemia (Tamary H 2008, Blood. 112:5241-4). GDF15 has also been linked to multiple biological activities in literature reports. Studies of GDF15 knockout and transgenic mice suggested that GDF15 may be protective against ischemic/reperfusion- or overload-induced heart injury (Kempf T, 2006, Circ Res.98:351-60) (Xu J, 2006, Circ Res. 98:342-50), protective against aging-associated motor neuron and sensory neuron loss (Strelau J, 2009, J Neurosci. 29: 13640-8), mildly protective against metabolic acidosis in kidney, and may cause cachexia in cancer patients (Johnen H 2007 Nat Med. 11: 1333-40). Many groups also studied the role of GDF15 in cell apoptosis and proliferation and reported controversial results using different cell culture and xenograft models. Studies on transgenic mice showed that GDF15 is protective against carcinogen or Apc mutation induced neoplasia in intestine and lung (Baek S J 2006, Gastroenterology. 131: 1553-60; Cekanova M 2009, Cancer Prev Res 2:450-8).

[0057] The X-ray crystal structure of the human mature GDF15 protein reveals a disulfide-linked dimeric structure. Each GDF15 monomer adopts a fold similar to other TGFbeta superfamily cysteine knot proteins with a significant difference seen at the N-terminal. The mature GDF15 protein contains a total of nine cysteines all of which are disulfide bonded with Cys273, forming the inter-chain disulfide across the dimer interface. The disulfide bonding pattern of the first four Cysteines is unique to GDF15 when compared with TGFbeta and BMP family members. Cys203 and Cys210 (the first two cysteines in the mature protein) form a disulfide with each other to make a small loop structure protruding from the protein.

[0058] The remaining disulfides are structurally similar to the TGFbeta family but are formed by Cys211-Cys274 (third and seventh cysteines), Cys240-Cys305 (fourth and eighth cysteines) and Cys244-Cys307 (fifth and ninth cysteines). The crystal structure further revealed that there is an extensive peptide-peptide interface in the human GDF-15 homodimer, with ˜1300 square Angstroms of buried surface area and involvement of 37 amino acids.

[0059] The crystal structure shows that the following amino acids are involved in the peptide-peptide interface: Val216, Asp222, Leu223, Trp225, Val237, Met239, Ile241, Asn252, Met253, His254, Ile257, Lys258, Ser260, Leu261, Leu264, Lys265, Thr268, Val269, Pro270, Cys273, Val275, Pro276, Tyr279, Tyr297, Asp299, Leu300 and Ile308. The last amino-acid of the mature peptide, Ile308, is positioned fewer than 10 angstroms away from its dimer partner. Unusually for the superfamily, the electron density is consistent with the side-chain pointing toward the interior of the protein structure to form a hydrophobic pocket with Val275 and Pro276. Other family members have the carboxylic acid pointing toward the inside of the structure and the sidechain solvent exposed (ref TGFb3 (2PJY), BMP6(2R52), BMP7(1LX5), GDFS(3EVS), GDF2(4FAO)). This suggests that GDF15 might be unique in its ability to accommodate longer peptide sequences at the COOH-termini without perturbation of its protein fold.

[0060] In one embodiment, the methods of the invention comprise GDF15 fusion proteins as described herein, e.g., the serum albumin fusions. In some embodiments, said fusions can contain any suitable SA moiety, any suitable GDF15 moiety, and if desired, any suitable linker. Generally, the SA moiety, GDF15 moiety and, if present, linker, are selected to provide a fusion polypeptide that would be predicted to have therapeutic efficacy in NASH, NAFLD, or the other disorders described herein, and to be immunologically compatible with the species to which it is intended to be administered. For example, when the fusion polypeptide is intended to be administered to humans the SA moiety can be HSA or a functional variant thereof, and the GDF15 moiety can be human GDF15 or a functional variant thereof. Similarly, SA and functional variants thereof and GDF15 and functional variants thereof that are derived from other species (e.g., pet or livestock animals) can be used when the fusion protein is intended for use in such species.

[0061] In a particular embodiment, GDF15 fusions for use in the methods of the present invention do not comprise GDF15 fusions (e.g., SA-GDF15 fusions or HSA-GDF15 fusions) described in PCT Publication No. WO2015/198199, which is incorporated by reference herein in its entirety.

[0062] In a particular embodiment, GDF15 conjugates for use in the methods of the present invention do not comprise GDF15 conjugates (e.g., fatty acid-GDF15 conjugates) described in PCT Publication No. WO2015/200078, which is incorporated by reference herein in its entirety.

### GDF15 Moiety

[0063] The GDF15 moiety used in the present methods of the invention, e.g., in any GDF15 fusion protein or conjugate, such as fatty acid conjugate, can be any suitable GDF15 polypeptide or functional variant thereof, for example a GDF15 variant described in Table 1. Preferably, the GDF15 moiety is human GDF15 or a functional variant thereof. Human GDF15 is synthesized as a 308 amino acid preproprotein (SEQ ID NO:1) that includes a signal peptide (amino acids 1-29), a propeptide (amino acids 30-196), and the 112 amino acid mature GDF15 peptide (amino acids 197-308 (SEQ ID NO:5)). The propeptide and mature peptide have been reported as amino acids 30-194 and 195-308 of SEQ ID NO:2, respectively. (See, Uniprot sequence Q99988.) Sequence variations have been reported. For example, amino acids 202, 269 and 288 (in SEQ ID NO:2) have been reported to be Asp, Glu and Ala, respectively. (Hromas R, et al., Biochem. Biophys. Acta 1354:40-44 (1997), Lawton L. N. et al, Gene 203:17-26 (1997).)

[0064] Fusion proteins used in the present methods of the invention that contain a human GDF15 moiety generally contain the 112 amino acid mature GDF15 peptide (e.g., amino acids 197-308 of SEQ ID NO:1, SEQ ID NO:5) or a functional variant thereof. The functional variant can include one or more amino acid deletions, additions or replacements in any desired combination, for example, a GDF15 variant in Table 1. The amount of amino acid sequence variation (e.g., through amino acid deletions, additions or replacements) is limited to preserve weight loss activity of the mature GDF15 peptide. In some embodiments, the functional variant of a mature GDF15 peptide has from 1 to about 20, 1 to about 18, 1 to about 17, 1 to about 16, 1 to about 15, 1 to about 14, 1 to about 13, 1 to about 12, 1 to about 11, 1 to about 10, 1 to about 9, 1 to about 8, 1 to about 7, 1 to about 6, or 1 to about 5 amino acid deletions, additions or replacements, in any desired combination, relative to SEQ ID NO:5. Alternatively or in addition, the functional variant can have an amino acid sequence that has at least about 80%, at least about 85%, at least about 90%, or at least about 95%, 96%, 97%, 98%, or 99% amino acid sequence identity with SEQ ID NO:5, preferably when measured over the full length of SEQ ID NO:5. In a specific embodiment, a GDF15 functional variant can have an amino acid sequence that has at least 90%, at least 95%, or at least 98% amino acid sequence identity with SEQ ID NO:5, preferably when measured over the full length of SEQ ID NO:5.

[0065] Without wishing to be bound by any particular theory, it may be that GDF15's therapeutic efficacy in NASH, NAFLD, and related conditions is mediated either through cellular signaling initiated by the binding of GDF15 (and the fusion proteins and variants described herein) to one or more receptors and/or soluble co-factors, or by regulation of signaling pathways utilized by other factors via direct competition or allosteric modulation. Amino acid substitutions, deletions, or additions are preferably at positions that are not involved with receptor or co-factor binding, nor involved in maintaining overall protein conformation via intr-peptide interactions.

[0066] For example, the amino acids at positions 216, 222, 223, 225, 237, 239, 241, 252, 253, 254, 257, 258, 260, 261, 264, 265, 268, 269, 270, 273, 275, 276, 279, 297, 299, 300 and 308 are involved in the peptide-peptide interface. In specific embodiments, any amino acid replacements at these positions are generally disfavored, and any replacements should be conservative replacements. Amino acids that are surface exposed but are not conserved among species can generally be replaced with other amino acids without disrupting the folding of the peptide or its weight loss activity. The inventors have determined the crystal structure of the human mature GDF15 peptide and identified the amino acids at positions 217, 219, 226, 234, 243, 246, 247, 263, 265, 268, 277, 280, 287, 290, 303 and 304 as surface exposed residues that are not conserved in other species.

[0067] The inventors have determined the crystal structure of the human mature GDF15 peptide and identified the amino acids at positions 217, 219, 226, 234, 243, 246, 247, 263, 265, 268, 277, 280, 287, 290, 303 and 304 as surface exposed residues that are not conserved in other species. In addition, the amino terminal of mature human GDF15 (amino acids 197-210 of SEQ ID NO:1) and Cys203, Cys 210 and Cys273, which are not essential for weight loss activity, can generally be replaced with another amino acid and/or omitted. In a specific embodiment, the first 1-8 or the first 1-6 N-terminal amino acids of mature human GDF15 can be removed or substituted. In a specific embodiment, the first 1-5 or the first 1-4 N-terminal amino acids of mature human GDF15 can be removed or substituted. In a specific embodiment, the first 2 or the first 3 N-terminal amino acids of mature human GDF15 can be removed or substituted. In a specific embodiment, the first 3 or the first 6 N-terminal amino acids of mature human GDF15 can be removed or substituted.

[0068] Exemplary variants of human mature GDF15 peptide that are suitable for use in the fusion polypeptides include SEQ ID NO:5 in which one or more of the residues from position 1 to about 25 are replaced or deleted. For example, the variant can have the sequence of SEQ ID NO:44 in which the first 25, the first 15, the first 14, the first 13, the first 12, the first 11, the first 10, the first 9, the first 8, the first 7, the first 6, the first 5, the first 4, the first 3, the first 2, or the first 1 amino acid is deleted.

[0069] Additional exemplary variants of human mature GDF15 peptide that are suitable for use in the fusion polypeptides of the present invention include amino acids 197-308 of SEQ ID NO:1 (SEQ ID NO:5) in which the Arg at position 198, Asn at position 199, or Arg at position 198 and Asn at position 199 are replaced with one or more other amino acids. When amino acids are replaced, conservative amino acid replacements are preferred. In particular embodiments, Arg at position 198 is replaced with His or Asn at position 199 is replaced with Ala or Glu. In more particular embodiments Arg at position 198 is replaced with His and Asn at position 199 is replaced with Ala.

[0070] In a particular embodiment, exemplary variants of human mature GDF15 peptide that are suitable for use in the conjugates and fusion polypeptides of the present invention include amino acids 197-308 of SEQ ID NO:1 (SEQ ID NO:5) in which the Arg at position 198 is not replaced with His and Asn at position 199 is not replaced with Ala. In a specific embodiment, exemplary variants of human mature GDF15 peptide that are suitable for use in the conjugates and fusion polypeptides of the present invention do not comprise the GDF15 variant of SEQ ID NO: 41, or SEQ ID NO: 320, or

(SEQ ID NO: 321)

MHHHH HHAR NGDHC PLGPG RCCRL HTVRA SLEDL GWADW
VLSPR EVQVT MCIGA CPSQF RAANM HAQIK TSLHR LKPDT
VPAPC CVPAS YNPMV LIQKT DTGVS LQTYD DLLAK DCHCI
(M-(his)6-hGDF15),
or

(SEQ ID NO: 322)

MHHHHHHMARNGDHCPLGPGRCCRLHTVRASLEDLGWADWVLSPREVQV
TMCIGACPSQFRAANMHAQIKTSLHRLKPDTVPAPCCVPASYNPMVLIQ
KTDTGVSLQTYDDLLAKDCHCI (M-(his)6-M-hGDF15).

[0071] In a specific embodiment, exemplary variants of human mature GDF15 peptide that are suitable for use in fatty acid-GDF15 conjugates of the present invention do not comprise the GDF15 variant of SEQ ID NO: 41, or SEQ ID NO: 320, or

(SEQ ID NO: 321)

MHHHH HHAR NGDHC PLGPG RCCRL HTVRA SLEDL GWADW
VLSPR EVQVT MCIGA CPSQF RAANM HAQIK TSLHR LKPDT
VPAPC CVPAS YNPMV LIQKT DTGVS LQTYD DLLAK DCHCI
(M-(his)6-hGDF15),
or

(SEQ ID NO: 322)

MHHHHHHMARNGDHCPLGPGRCCRLHTVRASLEDLGWADWVLSPREVQV
TMCIGACPSQFRAANMHAQIKTSLHRLKPDTVPAPCCVPASYNPMVLIQ
KTDTGVSLQTYDDLLAKDCHCI (M-(his)6-M-hGDF15).

[0072] In a specific embodiment, exemplary variants of human mature GDF15 peptide that are suitable for use in fatty acid-GDF15 conjugates of the present invention do not comprise the GDF15 variant of SEQ ID NO: 41, or SEQ ID NO: 320, or

(SEQ ID NO: 321)

MHHHH HHAR NGDHC PLGPG RCCRL HTVRA SLEDL GWADW
VLSPR EVQVT MCIGA CPSQF RAANM HAQIK TSLHR LKPDT
VPAPC CVPAS YNPMV LIQKT DTGVS LQTYD DLLAK DCHCI
(M-(his)6-hGDF15),
or

(SEQ ID NO: 322)

MHHHHHHMARNGDHCPLGPGRCCRLHTVRASLEDLGWADWVLSPREVQV
TMCIGACPSQFRAANMHAQIKTSLHRLKPDTVPAPCCVPASYNPMVLIQ
KTDTGVSLQTYDDLLAKDCHCI (M-(his)6-M-hGDF15).

[0073] In a specific embodiment, exemplary variants of human mature GDF15 peptide that are suitable for use in a GDF15 fusion polypeptide, such as an SA-GDF15 fusion, of the present invention do not comprise the GDF15 variant of SEQ ID NO: 41, or SEQ ID NO: 320, or

(SEQ ID NO: 321)

MHHHH HHAR NGDHC PLGPG RCCRL HTVRA SLEDL GWADW
VLSPR EVQVT MCIGA CPSQF RAANM HAQIK TSLHR LKPDT
VPAPC CVPAS YNPMV LIQKT DTGVS LQTYD DLLAK DCHCI
(M-(his)6-hGDF15),
or

(SEQ ID NO: 322)

MHHHHHHMARNGDHCPLGPGRCCRLHTVRASLEDLGWADWVLSPREVQV
TMCIGACPSQFRAANMHAQIKTSLHRLKPDTVPAPCCVPASYNPMVLIQ
KTDTGVSLQTYDDLLAKDCHCI (M-(his)6-M-hGDF15).

[0074] In a particular embodiment, variants of human mature GDF15 peptide that are suitable for use in the conjugates and fusion polypeptides of the present invention include an amino acid sequence which is at 95% identical to SEQ ID NO:5, wherein the Arg at position 198 is not replaced with His and Asn at position 199 is not replaced with Ala, or wherein GDF15 variant is not SEQ ID NO: 41 or SEQ ID NO: 320. In a certain embodiment, variants of human mature GDF15 peptide that are suitable for use in the conjugates and fusion polypeptides of the present invention include those described in Table 1, wherein the Arg at position 198 is not replaced with His and Asn at position 199 is not replaced with Ala, or wherein GDF15 variant is not SEQ ID NO: 41 or SEQ ID NO: 320. In a certain embodiment, variants of human mature GDF15 peptide that are suitable for use in the conjugates (e.g., fatty acid-GDF15 conjugate) and fusion polypeptides (e.g., SA-GDF15 fusion polypeptide) of the present invention include those described in Table 1, wherein the variants of human mature GDF15 peptide do not comprise the GDF15 variant of SEQ ID NO: 41 or SEQ ID NO: 320, or

(SEQ ID NO: 321)

MHHHH HHAR NGDHC PLGPG RCCRL HTVRA SLEDL GWADW
VLSPR EVQVT MCIGA CPSQF RAANM HAQIK TSLHR LKPDT
VPAPC CVPAS YNPMV LIQKT DTGVS LQTYD DLLAK DCHCI
(M-(his)6-hGDF15),
or

(SEQ ID NO: 322)

MHHHHHHMARNGDHCPLGPGRCCRLHTVRASLEDLGWADWVLSPREVQV
TMCIGACPSQFRAANMHAQIKTSLHRLKPDTVPAPCCVPASYNPMVLIQ
KTDTGVSLQTYDDLLAKDCHCI (M-(his)6-M-hGDF15).

[0075] In a particular embodiment, variants of human mature GDF15 peptide that are suitable for use in the conjugates and fusion polypeptides of the present invention do not comprise GDF15 variants described in PCT Publication No. WO2015/198199, which is incorporated by reference herein in its entirety, for example SEQ ID NOs: SEQ ID NOS: 20, 26, 28, 30, 32, 38, 40 and 42 provided therein. In a particular embodiment, variants of human mature GDF15 peptide that are suitable for use in the conjugates and fusion polypeptides of the present invention do not comprise GDF15 variants comprising an amino acid replacement or deletion of one or more surface exposed residues (e.g., Arg217, Ser219, Ala226, Glu234, Ala243, Ser246, Gln247, Arg263, Lys265, Thr268, A3a277, Asn280, Lys287, Thr290, Lys303 and Asp3G4), one or more N-terminal amino acids (ammo acids 197-210), Cys 203, Cys 210 and/or Cys273. In a particular embodiment, variants of human mature GDF15 peptide that are suitable for use in the fusion polypeptides, such as albumin-GDF15 fusions (e.g., HSA-GDF15 fusions), of the present invention do not comprise GDF15 variants comprising an amino acid replacement or deletion of one or more surface exposed residues (e.g., Arg217, Ser219, Ala226, Glu234, Ala243, Ser246, Gln247, Arg263, Lys265, Thr268, A3a277, Asn280, Lys287, Thr290, Lys303 and Asp3G4), one or more N-terminal amino acids (ammo acids 197-210), Cys 203, Cys 210 and/or Cys273.

[0076] In a particular embodiment, variants of human mature GDF15 peptide that are suitable for use in the conjugates (e.g., fatty acid-GDF15 conjugates) and fusion polypeptides (e.g., SA-GDF15 fusion polypeptides such as HSA-GDF15 fusion polypeptides) of the present invention do not comprise the following GDF15 variants:

(i)
His6-hGDF15(197-308):

(SEQ ID NO: 6)

HHHHHHARNG DHCPLGPGRC CRLHTVRASL EDLGWADWVL
SPREVQVTMC IGACPSQFRA ANMHAQIKTS LHRLKPDTVP
APCCVPASYN PMVLIQKTDT GVSLQTYDDL LAKDCHCI;
(ii)
His8-TEV-hGDF15(197-308):

(SEQ ID NO: 7)

HHHHHHHHGG SENLYFQGAR NGDHCPLGPG RCCRLHTVRA
SLEDLGWADW VLSPREVQVT MCIGACPSQF RAANMHAQIK
TSLHRLKPDT VPAPCCVPAS YNPMVLIQKT DTGVSLQTYD
DLLAKDCHCI;
and
(iii)
hGDF15(197-308):

(SEQ ID NO: 5)

ARNGDHCPLG PGRCCRLHTV RASLEDLGWA DWVLSPREVQ
VTMCIGACPS QFRAANMHAQ IKTSLHRLKP DTVPAPCCVP
ASYNPMVLIQ KTDTGVSLQT YDDLLAKDCH CI.

[0077] Mature human GDF15 includes 9 cysteine residues, eight of which form intra-chain disulfide bonds in a pattern that is unique among TGFbeta superfamily members. In one embodiment, Cys203, 210 and 273 can be replaced with other amino acids or omitted if desired.

### Serum Albumin (SA) Moiety

[0078] The SA moiety is any suitable serum albumin (e.g., human serum albumin (HSA), or serum albumin from another species) or a functional variant thereof. Preferably, the SA moiety is an HSA or a functional variant thereof. The SA moiety prolongs the serum half-life of the fusion polypeptides to which it is added, in comparison to wild type GDF15. Methods for pharmacokinetic analysis and determination of serum half-life will be familiar to those skilled in the art. Details may be found in Kenneth, A et al: Chemical Stability of Pharmaceuticals: A Handbook for Pharmacists and in Peters et al, Pharmacokinetc analysis: A Practical Approach (1996). Reference is also made to “Pharmacokinetics,” M Gibaldi & D Perron, published by Marcel Dekker, 2^{nd} Rev. ex edition (1982), which describes pharmacokinetic parameters such as t alpha and t beta half-lives and area under the curve (AUC).

[0079] Human Serum Albumin (HSA) is a plasma protein of about 66,500 KDa and is comprised of 585 amino acids, including at least 17 disulfide bridges. (Peters, T., Jr. (1996), All about Albumin: Biochemistry, Genetics and Medical, Applications, pp 10, Academic Press, Inc., Orlando (ISBN 0-12-552110-3). HSA has a long half-life and is cleared very slowly by the liver. The plasma half-life of HSA is reported to be approximately 19 days (Peters, T., Jr. (1985) Adv. Protein Chem. 37, 161-245; Peters, T., Jr. (1996) All about Albumin, Academic Press, Inc., San Diego, Calif. (page 245-246)); Benotti P, Blackburn G L: Crit Care Med (1979) 7:520-525).

[0080] HSA has been used to produce fusion proteins that have improved shelf and half-lifes. For example, PCT Publications WO01/79271 A and WO03/59934 A disclose (i) albumin fusion proteins comprising a variety of therapeutic protein (e.g., growth factors, scFvs); and (ii) HSAs that are reported to have longer shelf and half-lives than their therapeutic proteins alone.

[0081] HSA may comprise the full length sequence of 585 amino acids of mature naturally occurring HSA (following processing and removal of the signal and propeptides (SEQ ID NO:4)) or naturally occurring variants thereof, including allelic variants. Naturally occurring HSA and variants thereof are well-known in the art. (See, e.g., Meloun, et al., FEBS Letters 58:136 (1975); Behrens, et al., Fed. Proc. 34:591 (1975); Lawn, et al., Nucleic Acids Research 9:6102-6114 (1981); Minghetti, et al., J. Biol. Chem. 261:6747 (1986)); and Weitkamp, et al., Ann. Hum. Genet. 37:219 (1973).)

[0082] Fusion proteins that contain a human serum albumin moiety generally contain the 585 amino acid HSA (amino acids 25-609 of SEQ ID NO:3, SEQ ID NO:4) or a functional variant thereof. The functional variant can include one or more amino acid deletions, additions or replacement in any desired combination, and includes functional fragments of HSA. The amount of amino acid sequence variation (e.g., through amino acid deletions, additions or replacements) is limited to preserve the serum half-life extending properties of HSA.

[0083] In some embodiments, the functional variant of HSA for use in the fusion proteins disclosed herein can have an amino acid sequence that has at least about 80%, at least about 85%, at least about 90%, or at least about 95% amino acid sequence identity with SEQ ID NO:4, preferably when measured over the full length sequence of SEQ ID NO:4. Alternatively or in addition, the functional variant of HSA can have from 1 to about 20, 1 to about 18, 1 to about 17, 1 to about 16, 1 to about 15, 1 to about 14, 1 to about 13, 1 to about 12, 1 to about 11, 1 to about 10, 1 to about 9, 1 to about 8, 1 to about 7, 1 to about 6, or 1 to about 5 amino acid deletions, additions or replacement, in any desired combination. In a specific embodiment, a functional variant of HSA for use in the fusion proteins disclosed herein comprises a C34A mutation.

[0084] Some functional variants of HSA for use in the fusion proteins disclosed herein may be at least 100 amino acids long, or at least 150 amino acids long, and may contain or consist of all or part of a domain of HSA, for example domain I (amino acids 1-194 of SEQ ID NO:4), II (amino acids 195-387 of SEQ ID NO:4), or III (amino acids 388-585 of SEQ ID NO:4). If desired, a functional variant of HSA may consist of or alternatively comprise any desired HSA domain combination, such as, domains I+II (amino acids 1-387 of SEQ ID NO:4), domains II+III (amino acids 195-585 of SEQ ID NO:4) or domains I+III (amino acids 1-194 of SEQ ID NO:4+amino acids 388-585 of SEQ ID NO:4). As is well-known in the art, each domain of HSA is made up of two homologous subdomains, namely amino acids 1-105 and 120-194, 195-291 and 316-387, and 388-491 and 512-585 of domains I, II, and III respectively, with flexible inter-subdomain linker regions comprising residues Lys106 to Glu119, Glu292 to Val315 and Glu492 to Ala511. In certain embodiments, the SA moiety of the fusions proteins of the present invention contains at least one subdomain or domain of HSA.

[0085] Functional fragments of HSA suitable for use in the fusion proteins disclosed herein will contain at least about 5 or more contiguous amino acids of HSA, preferably at least about 10, at least about 15, at least about 20, at least about 25, at least about 30, at least about 50, or more contiguous amino acids of HSA sequence or may include part or all of specific domains of HSA.

[0086] In some embodiments, the functional variant (e.g., fragment) of HSA for use in the fusion proteins disclosed herein includes an N-terminal deletion, a C-terminal deletions or a combination of N-terminal and C-terminal deletions. Such variants are conveniently referred to using the amino acid number of the first and last amino acid in the sequence of the functional variant. For example, a functional variant with a C-terminal truncation can be amino acids 1-387 of HSA (SEQ ID NO:4).

[0087] Examples of HSA and HSA variants (including fragments) that are suitable for use in the GDF15 fusion polypeptides described herein are known in the art. Suitable HSA and HSA variants include, for example full length mature HSA (SEQ ID NO:4) and fragments, such as amino acids 1-387, amino acids 54 to 61, amino acids 76 to 89, amino acids 92 to 100, amino acids 170 to 176, amino acids 247 to 252, amino acids 266 to 277, amino acids 280 to 288, amino acids 362 to 368, amino acids 439 to 447, amino acids 462 to 475, amino acids 478 to 486, and amino acids 560 to 566 of mature HSA. Such HSA polypeptides and functional variants are disclosed in PCT Publication WO 2005/077042A2, which is incorporated herein by reference in its entirety. Further variants of HSA, such as amino acids 1-373, 1-388, 1-389, 1-369, 1-419 and fragments that contain amino acid 1 through amino acid 369 to 419 of HSA are disclosed in European Published Application EP322094A1, and fragments that contain 1-177, 1-200 and amino acid 1 through amino acid 178 to 199 are disclosed in European Published Application EP399666A1.

[0088] In a particular embodiment, HSA-GDF15 fusion polypeptides that are suitable for use of the present invention do not comprise the following fusions:

(i)
HSA(25-609),C34S,N503Q-hGDF15(211-308):

(SEQ ID NO: 327)

DAHKSEVAHR FKDLGEENFK ALVLIAFAQY LQQSPFEDHV
KLVNEVTEFA KTCVADESAE NCDKSLHTLF GDKLCTVATL
RETYGEMADC CAKQEPERNE CFLQHKDDNP NLPRLVRPEV
DVMCTAFHDN EETFLKKYLY EIARRHPYFY APELLFFAKR
YKAAFTECCQ AADKAACLLP KLDELRDEGK ASSAKQRLKC
ASLQKFGERA FKAWAVARLS QRFPKAEFAE VSKLVTDLTK
VHTECCHGDL LECADDRADL AKYICENQDS ISSKLKECCE
KPLLEKSHCI AEVENDEMPA DLPSLAADFV ESKDVCKNYA
EAKDVFLGMF LYEYARRHPD YSVVLLLRLA KTYETTLEKC
CAAADPHECY AKVFDEFKPL VEEPQNLIKQ NCELFEQLGE
YKFQNALLVR YTKKVPQVST PTLVEVSRNL GKVGSKCCKH
PEAKRMPCAE DYLSVVLNQL CVLHEKTPVS DRVTKCCTES
LVNRRPCFSA LEVDETYVPK EFQAETFTFH ADICTLSEKE
RQIKKQTALV ELVKHKPKAT KEQLKAVMDD FAAFVEKCCK
ADDKETCFAE EGKKLVAASQ AALGLGGGGS GGGGSGGGGS
CRLHTVRASL EDLGWADWVL SPREVQVTMC IGACPSQFRA
ANMHAQIKTS LHRLKPDTVP APCCVPASYN PMVLIQKTDT
GVSLQTYDDL LAKDCHCI;
(ii)
HSA-3x4GS-hGDF15(197-308):

(SEQ ID NO: 328)

DAHKSEVAHR FKDLGEENFK ALVLIAFAQY LQQCPFEDHV
KLVNEVTEFA KTCVADESAE NCDKSLHTLF GDKLCTVATL
RETYGEMADC CAKQEPERNE CFLQHKDDNP NLPRLVRPEV
DVMCTAFHDN EETFLKKYLY EIARRHPYFY APELLFFAKR
YKAAFTECCQ AADKAACLLP KLDELRDEGK ASSAKQRLKC
ASLQKFGERA FKAWAVARLS QRFPKAEFAE VSKLVTDLTK
VHTECCHGDL LECADDRADL AKYICENQDS ISSKLKECCE
KPLLEKSHCI AEVENDEMPA DLPSLAADFV ESKDVCKNYA
EAKDVFLGMF LYEYARRHPD YSVVLLLRLA KTYETTLEKC
CAAADPHECY AKVFDEFKPL VEEPQNLIKQ NCELFEQLGE
YKFQNALLVR YTKKVPQVST PTLVEVSRNL GKVGSKCCKH
PEAKRMPCAE DYLSVVLNQL CVLHEKTPVS DRVTKCCTES
LVNRRPCFSA LEVDETYVPK EFNAETFTFH ADICTLSEKE
RQIKKQTALV ELVKHKPKAT KEQLKAVMDD FAAFVEKCCK
ADDKETCFAE EGKKLVAASQ AALGLGGGGS GGGGSGGGGS
ARNGDHCPLG PGRCCRLHTV RASLEDLGWA DWVLSPREVQ
VTMCIGACPS QFRAANMHAQ IKTSLHRLKP DTVPAPCCVP
ASYNPMVLIQ KTDTGVSLQT YDDLLAKDCH CI;
(iii)
HSA-GGGGS-hGDF15(197-308):

(SEQ ID NO: 329)

DAHKSEVAHR FKDLGEENFK ALVLIAFAQY LQQCPFEDHV
KLVNEVTEFA KTCVADESAE NCDKSLHTLF GDKLCTVATL
RETYGEMADC CAKQEPERNE CFLQHKDDNP NLPRLVRPEV
DVMCTAFHDN EETFLKKYLY EIARRHPYFY APELLFFAKR
YKAAFTECCQ AADKAACLLP KLDELRDEGK ASSAKQRLKC
ASLQKFGERA FKAWAVARLS QRFPKAEFAE VSKLVTDLTK
VHTECCHGDL LECADDRADL AKYICENQDS ISSKLKECCE
KPLLEKSHCI AEVENDEMPA DLPSLAADFV ESKDVCKNYA
EAKDVFLGMF LYEYARRHPD YSVVLLLRLA KTYETTLEKC
CAAADPHECY AKVFDEFKPL VEEPQNLIKQ NCELFEQLGE
YKFQNALLVR YTKKVPQVST PTLVEVSRNL GKVGSKCCKH
PEAKRMPCAE DYLSVVLNQL CVLHEKTPVS DRVTKCCTES
LVNRRPCFSA LEVDETYVPK EFNAETFTFH ADICTLSEKE
RQIKKQTALV ELVKHKPKAT KEQLKAVMDD FAAFVEKCCK
ADDKETCFAE EGKKLVAASQ AALGLGGGGS ARNGDHCPLG
PGRCCRLHTV RASLEDLGWA DWVLSPREVQ VTMCIGACPS
QFRAANMHAQ IKTSLHRLKP DTVPAPCCVP ASYNPMVLIQ
KTDTGVSLQT YDDLLAKDCH CI;
(iv)
HSA-GPPGS-hGDF15(197-308):

(SEQ ID NO: 330)

DAHKSEVAHR FKDLGEENFK ALVLIAFAQY LQQCPFEDHV
KLVNEVTEFA KTCVADESAE NCDKSLHTLF GDKLCTVATL
RETYGEMADC CAKQEPERNE CFLQHKDDNP NLPRLVRPEV
DVMCTAFHDN EETFLKKYLY EIARRHPYFY APELLFFAKR
YKAAFTECCQ AADKAACLLP KLDELRDEGK ASSAKQRLKC
ASLQKFGERA FKAWAVARLS QRFPKAEFAE VSKLVTDLTK
VHTECCHGDL LECADDRADL AKYICENQDS ISSKLKECCE
KPLLEKSHCI AEVENDEMPA DLPSLAADFV ESKDVCKNYA
EAKDVFLGMF LYEYARRHPD YSVVLLLRLA KTYETTLEKC
CAAADPHECY AKVFDEFKPL VEEPQNLIKQ NCELFEQLGE
YKFQNALLVR YTKKVPQVST PTLVEVSRNL GKVGSKCCKH
PEAKRMPCAE DYLSVVLNQL CVLHEKTPVS DRVTKCCTES
LVNRRPCFSA LEVDETYVPK EFNAETFTFH ADICTLSEKE
RQIKKQTALV ELVKHKPKAT KEQLKAVMDD FAAFVEKCCK
ADDKETCFAE EGKKLVAASQ AALGLGPPGS ARNGDHCPLG
PGRCCRLHTV RASLEDLGWA DWVLSPREVQ VTMCIGACPS
QFRAANMHAQ IKTSLHRLKP DTVPAPCCVP ASYNPMVLIQ
KTDTGVSLQT YDDLLAKDCH CI;
(v)
HSA-hGDF15(197-308)(no linker):

(SEQ ID NO: 331)

DAHKSEVAHR FKDLGEENFK ALVLIAFAQY LQQCPFEDHV
KLVNEVTEFA KTCVADESAE NCDKSLHTLF GDKLCTVATL
RETYGEMADC CAKQEPERNE CFLQHKDDNP NLPRLVRPEV
DVMCTAFHDN EETFLKKYLY EIARRHPYFY APELLFFAKR
YKAAFTECCQ AADKAACLLP KLDELRDEGK ASSAKQRLKC
ASLQKFGERA FKAWAVARLS QRFPKAEFAE VSKLVTDLTK
VHTECCHGDL LECADDRADL AKYICENQDS ISSKLKECCE
KPLLEKSHCI AEVENDEMPA DLPSLAADFV ESKDVCKNYA
EAKDVFLGMF LYEYARRHPD YSVVLLLRLA KTYETTLEKC
CAAADPHECY AKVFDEFKPL VEEPQNLIKQ NCELFEQLGE
YKFQNALLVR YTKKVPQVST PTLVEVSRNL GKVGSKCCKH
PEAKRMPCAE DYLSVVLNQL CVLHEKTPVS DRVTKCCTES
LVNRRPCFSA LEVDETYVPK EFNAETFTFH ADICTLSEKE
RQIKKQTALV ELVKHKPKAT KEQLKAVMDD FAAFVEKCCK
ADDKETCFAE EGKKLVAASQ AALGLARNGD HCPLGPGRCC
RLHTVRASLE DLGWADWVLS PREVQVTMCI GACPSQFRAA
NMHAQIKTSL HRLKPDTVPA PCCVPASYNP MVLIQKTDTG
VSLQTYDDLL AKDCHCI;
(vi)
HSA-hGDF15(197-308), R198H:

(SEQ ID NO: 332)

DAHKSEVAHR FKDLGEENFK ALVLIAFAQY LQQCPFEDHV
KLVNEVTEFA KTCVADESAE NCDKSLHTLF GDKLCTVATL
RETYGEMADC CAKQEPERNE CFLQHKDDNP NLPRLVRPEV
DVMCTAFHDN EETFLKKYLY EIARRHPYFY APELLFFAKR
YKAAFTECCQ AADKAACLLP KLDELRDEGK ASSAKQRLKC
ASLQKFGERA FKAWAVARLS QRFPKAEFAE VSKLVTDLTK
VHTECCHGDL LECADDRADL AKYICENQDS ISSKLKECCE
KPLLEKSHCI AEVENDEMPA DLPSLAADFV ESKDVCKNYA
EAKDVFLGMF LYEYARRHPD YSVVLLLRLA KTYETTLEKC
CAAADPHECY AKVFDEFKPL VEEPQNLIKQ NCELFEQLGE
YKFQNALLVR YTKKVPQVST PTLVEVSRNL GKVGSKCCKH
PEAKRMPCAE DYLSVVLNQL CVLHEKTPVS DRVTKCCTES
LVNRRPCFSA LEVDETYVPK EFNAETFTFH ADICTLSEKE
RQIKKQTALV ELVKHKPKAT KEQLKAVMDD FAAFVEKCCK
ADDKETCFAE EGKKLVAASQ AALGLGGGGS GGGGSGGGGS
AHNGDHCPLG PGRCCRLHTV RASLEDLGWA DWVLSPREVQ
VTMCIGACPS QFRAANMHAQ IKTSLHRLKP DTVPAPCCVP
ASYNPMVLIQ KTDTGVSLQT YDDLLAKDCH CI;
(vii)
HSA-hGDF15(197-308), R198H, N199A:

(SEQ ID NO: 333)

DAHKSEVAHR FKDLGEENFK ALVLIAFAQY LQQCPFEDHV
KLVNEVTEFA KTCVADESAE NCDKSLHTLF GDKLCTVATL
RETYGEMADC CAKQEPERNE CFLQHKDDNP NLPRLVRPEV
DVMCTAFHDN EETFLKKYLY EIARRHPYFY APELLFFAKR
YKAAFTECCQ AADKAACLLP KLDELRDEGK ASSAKQRLKC
ASLQKFGERA FKAWAVARLS QRFPKAEFAE VSKLVTDLTK
VHTECCHGDL LECADDRADL AKYICENQDS ISSKLKECCE
KPLLEKSHCI AEVENDEMPA DLPSLAADFV ESKDVCKNYA
EAKDVFLGMF LYEYARRHPD YSVVLLLRLA KTYETTLEKC
CAAADPHECY AKVFDEFKPL VEEPQNLIKQ NCELFEQLGE
YKFQNALLVR YTKKVPQVST PTLVEVSRNL GKVGSKCCKH
PEAKRMPCAE DYLSVVLNQL CVLHEKTPVS DRVTKCCTES
LVNRRPCFSA LEVDETYVPK EFNAETFTFH ADICTLSEKE
RQIKKQTALV ELVKHKPKAT KEQLKAVMDD FAAFVEKCCK
ADDKETCFAE EGKKLVAASQ AALGLGGGGS GGGGSGGGGS
AHAGDHCPLG PGRCCRLHTV RASLEDLGWA DWVLSPREVQ
VTMCIGACPS QFRAANMHAQ IKTSLHRLKP DTVPAPCCVP
ASYNPMVLIQ KTDTGVSLQT YDDLLAKDCH CI;
and
(viii)
HSA-hGDF15(197-308), N199E:

(SEQ ID NO: 334)

DAHKSEVAHR FKDLGEENFK ALVLIAFAQY LQQCPFEDHV
KLVNEVTEFA KTCVADESAE NCDKSLHTLF GDKLCTVATL
RETYGEMADC CAKQEPERNE CFLQHKDDNP NLPRLVRPEV
DVMCTAFHDN EETFLKKYLY EIARRHPYFY APELLFFAKR
YKAAFTECCQ AADKAACLLP KLDELRDEGK ASSAKQRLKC
ASLQKFGERA FKAWAVARLS QRFPKAEFAE VSKLVTDLTK
VHTECCHGDL LECADDRADL AKYICENQDS ISSKLKECCE
KPLLEKSHCI AEVENDEMPA DLPSLAADFV ESKDVCKNYA
EAKDVFLGMF LYEYARRHPD YSVVLLLRLA KTYETTLEKC
CAAADPHECY AKVFDEFKPL VEEPQNLIKQ NCELFEQLGE
YKFQNALLVR YTKKVPQVST PTLVEVSRNL GKVGSKCCKH
PEAKRMPCAE DYLSVVLNQL CVLHEKTPVS DRVTKCCTES
LVNRRPCFSA LEVDETYVPK EFNAETFTFH ADICTLSEKE
RQIKKQTALV ELVKHKPKAT KEQLKAVMDD FAAFVEKCCK
ADDKETCFAE EGKKLVAASQ AALGLGGGGS GGGGSGGGGS
AREGDHCPLG PGRCCRLHTV RASLEDLGWA DWVLSPREVQ
VTMCIGACPS QFRAANMHAQ IKTSLHRLKP DTVPAPCCVP
ASYNPMVLIQ KTDTGVSLQT YDDLLAKDCH CI.

### Linkers

[0089] Regarding the GDF15 fusion proteins (e.g., the serum albumin GDF15 fusion proteins) used in the present methods of the invention, the heterologous protein/peptide, e.g., SA, and GDF15 moieties can be directly bonded to each other in the contiguous polypeptide chain, or preferably indirectly bonded to each other through a suitable linker. The linker is preferably a peptide linker. Peptide linkers are commonly used in fusion polypeptides and methods for selecting or designing linkers are well-known. (See, e.g., Chen X et al. Adv. Drug Deliv. Rev. 65(10):135701369 (2013) and Wriggers W et al., Biopolymers 80:736-746 (2005).)

[0090] Peptide linkers generally are categorized as i) flexible linkers, ii) helix forming linkers, and iii) cleavable linkers, and examples of each type are known in the art. Preferably, a flexible linker is included in the fusion polypeptides described herein. Flexible linkers may contain a majority of amino acids that are sterically unhindered, such as glycine and alanine. The hydrophilic amino acid Ser is also conventionally used in flexible linkers. Examples of flexible linkers include, polyglycines (e.g., (Gly)₄ (SEQ ID NO: 335) and (Gly)₅) (SEQ ID NO: 336), polyalanines poly(Gly-Ala), and poly(Gly-Ser) (e.g., (Glyₙ-Serₙ)ₙ or (Serₙ-Glyₙ)ₙ, wherein each n is independent an integer equal to or greater than 1).

[0091] Peptide linkers can be of a suitable length. The peptide linker sequence may be at least 1, 2, 3, 4, 5, 6, 7, 8, 9, 10, 11, 12, 13, 14, 15, 16, 17, 18, 19, 20, 25, 30, 35, 40, 45, 50, 55, 60, 65, 70, 75, or more amino acid residues in length. For example, a peptide linker can be from about 5 to about 50 amino acids in length; from about 10 to about 40 amino acids in length; from about 15 to about 30 amino acids in length; or from about 15 to about 20 amino acids in length. Variation in peptide linker length may retain or enhance activity, giving rise to superior efficacy in activity studies. The peptide linker sequence may be comprised of a naturally, or non-naturally, occurring amino acids.

[0092] In some aspects, the amino acids glycine and serine comprise the amino acids within the linker sequence. In certain aspects, the linker region comprises sets of glycine repeats (GSG₃)ₙ, where n is a positive integer equal to or greater than 1 (preferably 1 to about 20) (SEQ ID NO:305). More specifically, the linker sequence may be GSGGG (SEQ ID NO:306). The linker sequence may be GSGG (SEQ ID NO:307). In certain other aspects, the linker region orientation comprises sets of glycine repeats (SerGly₃)ₙ, where n is a positive integer equal to or greater than 1 (preferably 1 to about 20) (SEQ ID NO:308).

[0093] In more embodiments, a linker may contain glycine (G) and serine (S) in a random or preferably a repeated pattern. For example, the linker can be (GGGGS)ₙ (SEQ ID NO:303), wherein n is an integer ranging from 1 to 20, preferably 1 to 4. In a particular example, n is 3 and the linker is GGGGSGGGGSGGGGS (SEQ ID NO:300).

[0094] In other embodiments, a linker may contain glycine (G), serine (S) and proline (P) in a random or preferably repeated pattern. For example, the linker can be (GPPGS)ₙ (SEQ ID NO:304), wherein n is an integer ranging from 1 to 20, preferably 1-4. In a particular example, n is 1 and the linker is GPPGS (SEQ ID NO:309).

[0095] In general, the linker is not immunogenic when administered in a patient, such as a human. Thus linkers may be chosen such that they have low immunogenicity or are thought to have low immunogenicity.

[0096] The linkers described herein are exemplary, and the linker can include other amino acids, such as Glu and Lys, if desired. The peptide linkers may include multiple repeats of, for example, (G₄S) (SEQ ID NO:310), (G₃S) (SEQ ID NO:311), (G₂S) (SEQ ID NO:312) and/or (GlySer) (SEQ ID NO:313), if desired. In certain aspects, the peptide linkers may include multiple repeats of, for example, (SW (SEQ ID NO:314), (SG₃) (SEQ ID NO:315), (SG₂) (SEQ ID NO:316) or (SerGly) (SEQ ID NO:317). In other aspects, the peptide linkers may include combinations and multiples of repeating amino acid sequence units, such as (G₃S)+(G₄S)+(GlySer) (SEQ ID NO:311+SEQ ID NO:310+SEQ ID NO:313). In other aspects, Ser can be replaced with Ala e.g., (G₄A) (SEQ ID NO:318) or (G₃A) (SEQ ID NO: 301). In yet other aspects, the linker comprises the motif (EAAAK)ₙ, where n is a positive integer equal to or greater than 1, preferably 1 to about 20 (SEQ ID NO:319). In certain aspects, peptide linkers may also include cleavable linkers.

[0097] In a particular embodiment, a GDF15 fusion or conjugate used in the present methods of the invention comprises a GDF15 moiety (e.g., a GDF15 polyptide comprising an amino acid sequence that is at least 95% identical to SEQ ID NO: 5) linked to a heterologous protein/peptide (e.g., HSA or Fc) or a conjugate moiety with a linker, wherein the linker has the amino acid sequence GGSSEAAEAAEAAEAAEAAEAAE (SEQ ID NO: 337). Additional non-limiting examples of linkers are described in PCT Publication No. WO2015/197446, which is incorporated herein by reference in its entirety, such as SEQ ID NOs: 4-13 and 24-38.

[0098] Regarding the GDF15 conjugates (e.g., the GDF15 FA conjugates) used in the present methods of the invention, the GDF15 moiety and conjugate moiety, e.g., fatty acid moiety, can be joined by a linker as follows:

[0099] The linker separates the GDF15 moiety and the conjugate moiety, e.g., fatty acid moiety. In particular embodiments, its chemical structure is not critical, since it serves primarily as a spacer.

[0100] In a specific embodiment, the linker is a chemical moiety that contains two reactive groups/functional groups, one of which can react with the GDF15 moiety and the other with the conjugate moiety, e.g., fatty acid moiety. The two reactive/functional groups of the linker are linked via a linking moiety or spacer, structure of which is not critical as long as it does not interfere with the coupling of the linker to the GDF15 moiety and the conjugate moiety, e.g., fatty acid moiety, such as for example fatty acid moieties of Formula A1, A2 or A3.

[0101] The linker can be made up of amino acids linked together by peptide bonds. The amino acids can be natural or non-natural amino acids. In some embodiments of the present invention, the linker is made up of from 1 to 20 amino acids linked by peptide bonds, wherein the amino acids are selected from the 20 naturally occurring amino acids. In various embodiments, the 1 to 20 amino acids are selected from the amino acids glycine, serine, alanine, methionine, asparagine, glutamine, cysteine, glutamic acid and lysine, or amide derivatives thereof such as lysine amide. In some embodiments, a linker is made up of a majority of amino acids that are sterically unhindered, such as glycine and alanine. In some embodiments, linkers are polyglycines, polyalanines, combinations of glycine and alanine (such as poly(Gly-Ala)), or combinations of glycine and serine (such as poly(Gly-Ser)). In some embodiments, a linker is made up of a majority of amino acids selected from histidine, alanine, methionine, glutamine, asparagine and glycine. In some embodiments, the linker contains a poly-histidine moiety. In other embodiments, the linker contains glutamic acid, glutamine, lysine or lysine amide or combination thereof.

[0102] In some embodiment, the linker may have more than two available reactive functional groups and can therefore serve as a way to link more than one fatty acid moiety. For example, amino acids such as Glutamine, Glutamic acid, Serine or Lysine can provide several points of attachment for a fatty acid moiety: the side chain of the amino acid and the functionality at the N-terminus or the C-terminus.

[0103] In some embodiments, the linker comprises 1 to 20 amino acids which are selected from non-natural amino acids. While a linker of 1-10 amino acid residues is preferred for conjugation with the fatty acid moiety, the present invention contemplates linkers of any length or composition. An example of non-natural amino acid linker is 8-Amino-3,6-dioxaoctanoic acid having the following formula:

[chemical structure]

or its repeating units.

[0104] The linkers described herein are exemplary, and linkers that are much longer and which include other residues are contemplated by the present invention. Non-peptide linkers are also contemplated by the present invention.

[0105] In other embodiments, the linker comprise one or more alkyl groups, alkenyl groups, cycloalkyl groups, aryl groups, heteroaryl groups, heterocyclic groups, polyethylene glycol and/or one or more natural or unatural amino acids, or combination thereof, wherein each of the alkyl, alkenyl, cycloalkyl, aryl, heteroaryl, heterocyclyl, polyethylene glycol and/or the natural or unatural amino acids are optionally combined and linked together, or linked to the GDF15 moiety and/or to the fatty acid moiety, via a chemical group selected from —C(O)O—, —OC(O)—, —NHC(O)—, —C(O)NH—, —O—, —NH—, —S—, —C(O)—, —OC(O)NH—, —NHC(O)—O—, ═NH—O—, ═NH—NH— or ═NH—N(alkyl)-.

[0106] Linkers containing alkyl spacer are for example —NH—(CH₂)_{z}—C(O)— or —S—(CH₂)_{z}—C(O)— or —O—(CH₂)_{z}—C(O)—, —NH—(CH₂)_{z}—NH—, —O—C(O)—(CH₂)_{z}—C(O)—O—, —C(O)—(CH₂)_{z}—O—, —NHC(O)—(CH₂)_{z}—C(O)—NH— and the like wherein z is 2-20 can be used. These alkyl linkers can further be substituted by any non-sterically hindering group, including, but not limited to, a lower alkyl (e.g., C₁-C₆), lower acyl, halogen (e.g., Cl, Br), CN, NH₂, or phenyl.

[0107] The linker can also be of polymeric nature. The linker may include polymer chains or units that are biostable or biodegradable. Polymers with repeat linkage may have varying degrees of stability under physiological conditions depending on bond lability. Polymers may contain bonds such as polycarbonates (—O—C(O)—O—), polyesters (—C(O)—O—), polyurethanes (—NH—C(O)—O—), polyamide (—C(O)—NH—). These bonds are provided by way of examples, and are not intended to limit the type of bonds employable in the polymer chains or linkers of the invention. Suitable polymers include, for example, polyethylene glycol (PEG), polyvinyl pyrrolidone, polyvinyl alcohol, polyamino acids, divinylether maleic anhydride, N-(2-hydroxypropyl)-methacrylicamide, dextran, dextran derivatives, polypropylene glycol, polyoxyethylated polyol, heparin, heparin fragments, polysaccharides, cellulose and cellulose derivatives, starch and starch derivatives, polyalkylene glycol and derivatives thereof, copolymers of polyalkylene glycols and derivatives thereof, polyvinyl ethyl ether, and the like and mixtures thereof. A polymer linker is for example polyethylene glycol (PEG). The PEG linker can be linear or branched. A molecular weight of the PEG linker in the present invention is not restricted to any particular size, but certain embodiments have a molecular weight between 100 to 5000 Dalton for example 500 to 1500 Dalton.

[0108] The linking moiety (or spacer) contains appropriate functional-reactive groups at both terminals that form a bridge between an amino group of the peptide or polypeptide/protein (e.g. N-terminus or side chain of a lysine) and a functional/reactive group on the fatty acid moiety (e.g the carboxylic acid functionality of the fatty acid moiety). Alternatively, the linking moiety (or spacer) contains appropriate functional-reactive groups at both terminals that form a bridge between an acid carboxylic group of the peptide or polypeptide/protein (e.g. C-terminus) and a functional/reactive group on the fatty acid moiety (e.g the carboxylic acid functionality of the fatty acid moiety of formula A1, A2 and A3).

[0109] The linker may comprise several linking moieties (or spacer) of different nature (for example a combination of amino acids, heterocyclyl moiety, PEG and/or alkyl moieties). In this instance, each linking moiety contains appropriate functional-reactive groups at both terminals that form a bridge between an amino group of the peptide or polypeptide/protein (e.g. the N-terminus or the side chain of a lysine) and the next linking moiety of different nature and/or contains appropriate functional-reactive groups that form a bridge between the prior linking moiety of different nature and the fatty acid moiety. In other instance, each linking moiety contains appropriate functional-reactive groups at both terminals that form a bridge between an acid carboxylic group of the peptide or polypeptide/protein (e.g. the C-terminus) and the next linking moiety of different nature and/or contains appropriate functional-reactive groups that form a bridge between the prior linking moiety of different nature and the fatty acid moiety.

[0110] Additionally, a linking moiety may have more than 2 terminal functional groups and can therefore be linked to more than one fatty acid moiety. Example of these multi-functional groups moieties are glutamic acid, lysine or serine. The side chain of the amino acid can also serve as a point of attachment for another fatty acid moiety.

[0111] The modified peptides or polypeptides and/or peptide-polypeptide partial construct (i.e. peptide/polypeptide attached to a partial linker) include reactive groups which can react with available reactive functionalities on the fatty acid moiety (or modified fatty acid moiety: i.e. already attached a partial linker) to form a covalent bond. Reactive groups are chemical groups capable of forming a covalent bond. Reactive groups are located at one site of conjugation and can generally be carboxy, phosphoryl, acyl group, ester or mixed anhydride, maleimide, N-hydroxysuccinimide, tetrazine, alkyne, imidate, pyridine-2-yl-disulfanyl, thereby capable of forming a covalent bond with functionalities like amino group, hydroxyl group, alkene group, hydrazine group, hydroxylamine group, an azide group or a thiol group at the other site of conjugation.

[0112] Reactive groups of particular interest for conjugating a GDF15 moiety to a linker and/or a linker to the fatty acid moiety and/or to conjugate various linking moieties of different nature together are N-hydroxysuccinimide, alkyne (more particularly cyclooctyne).

[0113] Functionalities include: 1. thiol groups for reacting with maleimides, tosyl sulfone or pyridine-2-yldisulfanyl; 2. amino groups (for example amino functionality of an amino acid) for bonding to carboxylic acid or activated carboxylic acid (e.g. amide bond formation via N-hydroxysuccinamide chemistry), phosphoryl groups, acyl group or mixed anhydride; 3. Azide to undergo a Huisgen cycloaddition with a terminal alkyne and more particularly cyclooctyne (more commonly known as click chemistry); 4. carbonyl group to react with hydroxylamine or hydrazine to form oxime or hydrazine respectively; 5. Alkene and more particularly strained alkene to react with tetrazine in an aza [4+2] addition. While several examples of linkers and functionalities/reactive group are described herein, the methods of the present invention contemplate linkers of any length and composition.

### GDF15 Fusion Polypeptides

[0114] In specific aspects, GDF15 fusion polypeptides described herein as useful for administration for the present methods of treatment of the invention may contain a GDF15 moiety and a heterologous moiety, and optionally a linker. In a particular embodiment, a GDF15 fusion polypeptide described herein as useful for administration for the present methods of treatment of the invention may contain a GDF15 moiety and a heterologous moiety which is alpha-1-antitrypsin (A1AT) or a variant thereof, and optionally a linker. For example, GDF15-A1AT fusion polypeptides are described in PCT Publication No. WO2016/102580, which is incorporated by reference herein in its entirety.

[0115] In specific aspects, GDF15 fusion polypeptides described herein as useful for administration for the present methods of treatment of the invention may contain a GDF15 moiety and a serum albumin (SA) moiety, and optionally a linker. In one embodiment, the fusion polypeptide is a contiguous amino acid chain in which the SA moiety is located N-terminally to the GDF15 moiety. The C-terminus of the SA moiety can be directly bonded to the N-terminus of the GDF15 moiety. Preferably, the C-terminus of the SA moiety is indirectly bonded to the N-terminus of the GDF15 moiety through a peptide linker.

[0116] The SA moiety and GDF15 moiety can be from any desired species. For example, the fusion protein can contain SA and GDF15 moieties that are from human, mouse, rat, dog, cat, horse or any other desired species. The SA and GDF15 moieties are generally from the same species, but fusion peptides in which the SA moiety is from one species and the GDF15 moiety is from another species (e.g., mouse SA and human GDF15) are also encompassed by this disclosure.

[0117] In some embodiments, the fusion polypeptide comprises mouse serum albumin or functional variant thereof and mature human GDF15 peptide or functional variant thereof. For example, the fusion protein can have the amino acid sequence of any of SEQ ID NOS: 9, 10, 12, 13, and 18.

[0118] In preferred embodiments, the SA moiety is an HSA or a functional variant thereof and the GDF15 moiety is the mature human GDF peptide or a functional variant thereof. When present, the optional linker is preferably a flexible peptide linker. In particular embodiments, the fusion polypeptide comprises

[0119] A) an SA moiety selected from the group consisting of HSA(25-609) (SEQ ID NO: 4), and HSA(25-609) in which Cys34 is replaced with Ser and Asn503 is replaced with Gln; and

[0120] B) a GDF15 moiety selected from the group consisting of:
[0121] human GDF15(197-308) (SEQ ID NO:5);
[0122] human GDF15(211-308) (amino acids 211-308 of SEQ ID NO:2);
[0123] human GDF15(197-308) (SEQ ID NO:5) in which Cys203 is replaced with Ser (C2035) and Cys210 is replaced with Ser (C210S); and
[0124] human GDF15(197-308) (SEQ ID NO:5) in which Cys273 is replaced with Ser (C273S).

[0125] If desired, the fusion polypeptide can further comprise a linker that links the C-terminus of the SA moiety to the N-terminus of the GDF15 moiety. Preferably, the linker is selected from (GGGGS)n (SEQ ID NO:303) and (GPPGS)n (SEQ ID NO:304), wherein n is one to about 20. Preferred linkers include ((GGGGS)n (SEQ ID NO:303) and (GPPGS)n (SEQ ID NO:304), wherein n is 1, 2, 3 or 4.

[0126] In more particular embodiments, the fusion polypeptide comprises HSA or a functional variant thereof, a linker, and mature human GDF15 polypeptide or a functional variant thereof and has an amino acid sequence that has at least about 90%, at least about 95%, at least about 96%, at least about 97%, at least about 98%, or at least about 99% amino acid sequence identity to any of SEQ ID NOs: 11, 18, 19, 15.

[0127] In even more particular embodiments, the fusion polypeptide has the amino acid sequence of SEQ ID NOs: 11, 14, 15, 16, 17, 20, 21, and 22.

[0128] If desired, the fusion polypeptide can contain additional amino acid sequence. For example, an affinity tag can be included to facilitate detecting and/or purifying the fusion polypeptide.

### GDF15 Conjugates

[0129] Various embodiments of the GDF15 conjugates, e.g., GDF15 fatty acid conjugates, that can be used in the present methods of treatment of the invention are described herein. It will be recognized that features specified in each embodiment may be combined with other specified features to provide further embodiments.

[0130] In a specific embodiment, a GDF15 conjugate for the methods provided here comprises a GDF15 polypeptide or a functional variant thereof conjugated to a moiety, such as a fatty acid moiety, optionally comprising a linker. In some embodiment of the invention, the fatty acid residue is a lipophilic residue.

[0131] In another embodiment the fatty acid residue is negatively charged at physiological pH. In another embodiment the fatty acid residue comprises a group which can be negatively charged. One preferred group which can be negatively charged is a carboxylic acid group.

[0132] In another embodiment of the invention, the fatty acid residue binds non-covalently to albumin or other plasma proteins. In yet another embodiment of the invention the fatty acid residue is selected from a straight chain alkyl group, a branched alkyl group, a group which has an ω-carboxylic acid group, a partially or completely hydrogenated cyclopentanophenanthrene skeleton.

[0133] In another embodiment the fatty acid residue is a cibacronyl residue.

[0134] In another embodiment the fatty acid residue has from 6 to 40 carbon atoms, from 8 to 26 carbon atoms or from 8 to 20 carbon atoms.

[0135] In another embodiment, the fatty acid residue is an acyl group selected from the group comprising R—C(O)— wherein R is a C₄₋₃₈ linear or branched alkyl or a C₄₋₃₈ linear or branched alkenyl where each said alkyl and alkenyl are optionally substituted with one ore more substituents selected from —CO₂H, hydroxyl, —SO₃H, halo and —NHC(O)C(O)OH. The acyl group (R—C(O)—) derives from the reaction of the corresponding carboxylic acid R—C(O)OH with an amino group on the GDF15 polypetide.

[0136] In another embodiment the fatty acid residue is an acyl group selected from the group comprising CH₃(CH₂)ᵣ—CO, wherein r is an integer from 4 to 38, preferably an integer from 4 to 24, more preferred selected from the group comprising CH₃(CH₂)₆CO—, CH₃(CH₂)₈—CO—, CH₃(CH₂)₁₀—CO—, CH₃(CH₂)₁₂—CO—, CH₃(CH₂)₁₄—CO—, CH₃(CH₂)₁₆—CO—, CH₃(CH₂)₁₈—CO—, CH₃(CH₂)₂₀—CO and CH₃(CH₂)₂₂—CO—.

[0137] In another embodiment the fatty acid residue is an acyl group of a straight-chain or branched alkane α, ω dicarboxylic acid.

[0138] In another embodiment the fatty acid residue is an acyl group selected from the group comprising HOOC—(CH₂)ₛCO—, wherein s is an integer from 4 to 38, preferably an integer from 4 to 24, more preferred selected from the group comprising HOOC(CH₂)₁₄—CO—, HOOC(CH₂)₁₆—CO—, HOOC(CH₂)₁₈—CO—, HOOC(CH₂)₂₀—CO— and HOOC(CH₂)₂₂—CO—.

[0139] In another embodiment the fatty acid residue is a group of the formula CH₃—(CH₂)ₓ—CO—NH—CH(CH₂CO₂H)—C(O)— wherein x is an integer of from 8 to 24.

[0140] In yet another embodiment the fatty acid residue is selected from the group consisting of:

[0141] CH₃—(CH₂)₆₋₂₄—CO₂H; CF₃—(CF₂)₄₋₉—CH₂CH₂—CO₂H; CF₃—(CF₂)₄₋₉—CH₂CH₂—O—CH₂—CO₂H; CO₂H—(CH₂)₆₋₂₄—CO₂H; SO₂H—(CH₂)₆₋₂₄—CO₂H; wherein the fatty acid is linked to an amino group on GDF15 polypeptide (N-terminus or side chain of a lysine) or to an amino group on a linker via one of its carboxylic functionalities.

[0142] Specific examples of fatty acid are:

[chemical structure]

wherein the fatty acid is linked to the N-terminus of GDF15 or to an amino group on the side chain of GDF15 or to an amino group on a linker via one of its carboxylic acid functionalities.

[0143] Of particular interest, the linker between the above mentioned fatty acids and the GDF15 comprises lysine, glutamic acid, repeating units of:

[chemical structure]

preferably 1 to 3; or mixture thereof.

[0144] More preferably, the linker comprises one or more glutaminc acid amino acids and one or more repeating unit of CO₂H—CH₂—O—CH₂—CH₂—O—CH₂—CH₂—NH₂.

[0145] Examples of fatty acid linked to one or two glutamic acid amino acids are:

[chemical structure]

[0146] wherein the chiral carbon atoms independently are either R or S and wherein the fatty acid-linker moiety is linked to the N-terminus of GDF15 or to an amino group on the side chain of GDF15 or to an amino group on another linking moiety via one of the Glutamic acid's carboxylic acid functionalities.

[0147] Also of particular interest, the linker comprises one or more Lysine or Lysine amide amino acids, and one or more repeating unit of CO₂H—CH₂—O—CH₂—CH₂—O—CH₂—CH₂—NH₂.

[0148] Example of fatty acid moity(ies) linked to a Lysine or/and a Lysine amide amino acids are:

[chemical structure]

wherein the primary amino group of the lysine is attached the C-terminus of GDF15 or to a carboxylic acid functionality on a side chain of GDF15; or to a carboxylic acid functionality on another linking moiety.

[0149] Another specific example of linkers to be used with above fatty acids is 4-sulfamoylbutanoic acid:

[chemical structure]

[0150] Examples of fatty acids linked to the above linker are:

[chemical structure]

wherein the fatty acid-linker moiety is linked to the N-terminus of GDF15 or to an amino group on the side chain of GDF15 or to an amino group on another linking moiety via the carboxylic acid functionality on the sulfamoyl butanoic acid moiety.

[0151] Additionally, such fatty acid linker construct can further comprise repeating units of:

[chemical structure]

preferably 1 to 4.

[0152] Other examples of fatty acid-linker constructs are further disclosed in US 2013/0040884, Albumin-binding conjugates comprising fatty acid and PEG (Novo Nordisk) which is incorporated by reference.

[0153] Such constructs are preferably linked to the N-terminus of GDF15 via a carboxylic acid functionality.

[0154] In embodiment 1, the invention pertains to a conjugate comprising a GDF15 moiety linked to a fatty acid moiety via a linker wherein the fatty acid moiety has the following Formulae A1, A2 or A3:

[chemical structure]

R¹ is CO₂H, H;
R², R³ and R⁴ are independently of each other H, OH, CO₂H, —CH═CH₂ or —C≡CH;
Ak is a branched C₆-C₃₀alkylene;
n, m and p are independently of each other an integer between 6 and 30; or an amide, an ester or a pharmaceutically acceptable salt thereof.

[0155] In embodiment 1A, the invention pertains to a conjugate according to embodiment 1 wherein the fatty acid moiety is of Formula A1. In a particular aspect of this embodiment, the conjugate comprises a fatty acid moiety of Formula A1 wherein n and m are independently 8 to 20, preferably 10 to 16. In another aspect of this embodiment, the invention pertains to a conjugate according to embodiment 1 or 1A wherein the fatty acid moiety is of Formula A1 and wherein at least one of R2 and R3 is CO2H.

[0156] In embodiment 2, the invention pertains to a conjugate according to embodiment 1 or 1A, wherein the fatty acid moiety is selected from the following Formulae:

[chemical structure]

wherein Ak3, Ak4, Ak5, Ak6 and Ak7 are independently a (C₈₋₂₀)alkylene, R5 and R6 are independently (C₈₋₂₀)alkyl.

[0157] In embodiment 3, the invention pertains to a conjugate according to embodiment 1, 1A or 2 wherein the fatty acid moiety is selected from the following Formulae:

[chemical structure]

[chemical structure]

[0158] In embodiment 3A, the invention pertains to a conjugate according to embodiment 1, 1A or 2 wherein the fatty acid moiety is selected from the following Formulae:

[chemical structure]

[0159] In embodiment 3B, the invention pertains to a conjugate according to embodiment 1 wherein the fatty acid moiety is of Formula A2 or A3. In a particular aspect of this embodiment, the conjugate comprises a fatty acid moiety of Formula A2 wherein p is 8 to 20, or a fatty acid moiety of Formula A3 wherein Ak is C₈₋₂₀alkylene.

[0160] In embodiment 3C, the invention pertains to a conjugate according to embodiment 1 or 3B wherein the fatty acid moiety is selected from the following Formulae:

[chemical structure]

wherein Ak₂ is C₈₋₂₀alkylene.

[0161] In embodiment 4, the invention pertains to a conjugate according to any of the preceding conjugate's embodiments wherein the linker comprise one or more alkyl groups, alkenyl groups, cycloalkyl groups, aryl groups, heteroaryl groups, heterocyclic groups, polyethylene glycol, one or more natural or unatural amino acids, or combination thereof, wherein each of the alkyl, alkenyl, cycloalkyl, aryl, heteroaryl, heterocyclyl, polyethylene glycol and/or the natural or unatural amino acids are optionally combined and linked together or linked to the GDF15 moiety and/or to the fatty acid moiety via a chemical group selected from —C(O)O—, —OC(O)—, —NHC(O)—, —C(O)NH—, —O—, —NH—, —S—, —C(O)—, —OC(O)NH—, —NHC(O)—O—, ═NH—O—, ═NH—NH— or ═NH—N(alkyl)-.

[0162] In embodiment 5, the fatty acid conjugates that can be used in the present methods of treatment of the invention pertain to a conjugate according to any of the preceding conjugate's embodiments, wherein the linker comprises an unbranched oligo ethylene glycol moiety of Formula:

[chemical structure]

wherein y is 0 to 34.

[0163] In embodiment 6, the invention pertains to conjugate according to any of the preceding conjugate's embodiments wherein the linker comprises (or further comprises) a heterocyclic moiety selected from the following Formulae:

[chemical structure]

[0164] Such heterocyclyl containing linkers are obtained for example by azide-alkyne Huisgen cycloaddition, which more commonly known as click chemistry. More particularly, some of the heterocyclyl depicted supra result from the reaction of a cycloalkyne with an azide-containing moiety.

[0165] Cycloalkyne are readily available from commercial sources and can therefore be functionalized via cycloaddition with a moiety containing an azide functionality (e.g. a linker containing a terminal azide functionality). Examples of the use of cyclic alkyne click chemistry in protein labeling has been described in US 2009/0068738 which is herein incorporated by reference.

[0166] Non-limiting examples of cycloakyne agents which can be used in Huisgen cycloaddition are:

[chemical structure]

[chemical structure]

[0167] In embodiment 6A, the invention pertains to a fatty acid conjugate wherein the linker comprises (or further comprises) a heterocyclyl selected from the following Formulae:

[chemical structure]

wherein r is an integer of 0 to 2 and s is an integer of 0 to 3.

[0168] Such heterocyclic linkers can be obtained via an aza [4+2] cycloadditon of an alkene, or preferably a strained alkene such as cycloalkane, with the following moiety:

[chemical structure]

wherein Rf is for example —CH₂NH₂, —OH, —CH₂—CO₂H, —S—CH₂—CO₂H, —(O—CH₂)₄₋₆—C(O)—OH— or

[chemical structure]

[0169] Such tetrazine moieties are readily available from commercial sources and can react with an alkene-containing moiety, for example a linker containing terminal alkene functionality.

[0170] In embodiment 6B, the invention pertains to a fatty acid conjugate wherein the linker comprises (or further comprises) a heterocyclyl of Formula:

[chemical structure]

[0171] Such heterocyclic moiety can be obtained by reacting a maleimide with a thiol containing moiety, such as for example a linker containing a terminal thiol functionality.

[0172] These reagents which are readily available and/or commercially available are attached directly or via a linker as described supra to the peptide or polypeptide of interest. The alkyne, maleimide or tetrazine reactive groups are reacted with a functional group (azide, thiol and alkene respectively) which is present on the fatty acid moiety or on a linker-fatty acid construct (such as for example a PEG-fatty acid construct).

[0173] In embodiment 7, the invention pertains to a conjugate according to any of the preceding conjugate's embodiments wherein the linker comprises or further comprises one or more amino acids independently selected from histidine, methionine, alanine, glutamine, asparagine and glycine. In one particular aspect of this embodiment, the linker comprises 1 to 6 amino acid selected from histidine, alanine and methionine.

[0174] In embodiment 8, the invention pertains to a conjugate according to any one of the preceding conjugate's embodiments wherein the GDF15 moiety is human Growth Differentiation Factor 15 (GDF15), or related proteins and homologs, variants, fragments and other modified forms thereof. In embodiment 8A, the invention pertains to a conjugate according to any one of the preceding conjugate's embodiments wherein the GDF15 moiety is human Growth Differentiation Factor 15 (GDF15) variant.

[0175] In embodiment 8B, the invention contemplates a conjugate according to embodiment 8A wherein the human GDF15 variant is obtained by replacement of one or more amino acid residues of the mature polypeptide with another residue. In one particular aspect of this embodiment, the last two amino acid residues at the N-terminal of human GDF15 (i.e Arginine 198 and Alanine 197) have been replaced with an amino acid sequence XH— wherein H is histidine and X is an amino acid selected from methionine, alanine, glutamine, asparagine and glycine. In a preferred aspect of this embodiment, the hGDF15 variant is MH(199-308)hGDF15 or AH(199-308)hGDF15.

[0176] In embodiment 8C, the last three amino acid residues at the N-terminal of human GDF15 (i.e. Asparagine 199, Arginine 198 and Alanine 197) have been replaced with an amino acid sequence XHX′— wherein H is histidine and X′ and X are amino acids independently selected from selected from methionine, alanine, glutamine, asparagine and glycine. In another aspect of this embodiment, the last three amino acid residues at the N-terminal of human GDF15 (i.e. Asparagine 199, Arginine 198 and Alanine 197) have been replaced with an amino acid sequence AHX′— wherein H is histidine and X′ is an amino acids independently selected from selected from methionine, alanine, glutamine, asparagine and glycine. In a preferred aspect of this embodiment, the modified GDF15 protein is MHA(200-308)hGDF15 or AHA(200-308)hGDF15.

[0177] In one embodiment, the invention is directed toward a GDF15 fatty acid conjugates comprising a fatty acid is of the Formula R—CO2H wherein R is a C₄₋₃₈ linear or branched alkyl or a C₄₋₃₈ linear or branched alkenyl where each said alkyl and alkenyl are optionally substituted with one ore more substituents selected from —CO₂H, hydroxyl, —SO₃H, halo and —NHC(O)C(O)OH but wherein the fatty acid residue is not a fatty acid according to Formulae A1, A2, A3 and wherein the fatty acid is not myristic acid.

[0178] In another embodiment, the invention pertains to a GDF15 fatty acid conjugates according to any one of embodiments 7, 8, 8B, 8C wherein the GDF15 fatty acid conjugates do not comprise a fatty acid of Formula A1, A2 or A3 and do not comprise myristic acid.

[0179] In another embodiment, the invention is directed toward a GDF15-fatty acid conjugates according to embodiment 1-8 wherein the GDF15 fatty acid conjugate does not comprise the amino sequence of:

(i)
SEQ ID NO: 41;
(ii)

(SEQ ID NO: 321)

MHHHH HHAR NGDHC PLGPG RCCRL HTVRA SLEDL GWADW
VLSPR EVQVT MCIGA CPSQF RAANM HAQIK TSLHR LKPDT
VPAPC CVPAS YNPMV LIQKT DTGVS LQTYD DLLAK DCHCI
(M-(his)₆-hGDF15 (197-308)),
(iii)

(SEQ ID NO: 322)

MHHHHHHMARNGDHCPLGPGRCCRLHTVRASLEDLGWADWVLSPREVQV
TMCIGACPSQFRAANMHAQIKTSLHRLKPDTVPAPCCVPASYNPMVLIQ
KTDTGVSLQTYDDLLAKDCHCI (M-(his)₆-M-hGDF15
(197-308)),
(iv)

(SEQ ID NO: 323)

MHHHHHHAHARDGCPLGEGRCCRLQSLRASLQDLGWANWVVAPRELDVR
MCVGACPSQFRSANTHAQMQARLHGLNPDAAPAPCCVPASYEPVVLMHQ
DSDGRVSLTPFDDLVAKDCHCV (M-(his)₆-dGDF15),
(v)

(SEQ ID NO: 324)

MHNGDHCPLGPGRCCRLHTVRASLEDLGWADWVLSPREVQVTMCIGACP
SQFRAANMHAQIKTSLHRLKPDTVPAPCCVPASYNPMVLIQKTDTGVSL
QTYDDLLAKDCHCI (MH-hGDF15(199-308)),
(vi)

(SEQ ID NO: 325)

MHAGDHCPLGPGRCCRLHTVRASLEDLGWADWVLSPREVQVTMCIGACP
SQFRAANMHAQIKTSLHRLKPDTVPAPCCVPASYNPMVLIQKTDTGVSL
QTYDDLLAKDCHCI (MHA-hGDF15(200-308)),
and
(vii)

(SEQ ID NO: 326)

AHNGDHCPLGPGRCCRLHTVRASLEDLGWADWVLSPREVQVTMCIGACP
SQFRAANMHAQIKTSLHRLKPDTVPAPCCVPASYNPMVLIQKTDTGVSL
QTYDDLLAKDCHCI (AH-hGDF15(199-308).

[0180] Examples of Fatty acid GDF15 conjugates comprising fatty acid of Formula A1, A2, A3 have been described in PCT application No. WO2015/200080.

[0181] Compared to the native GDF15, the GDF15 variant enables the selective labeling of the protein at the N-terminus (i.e. conjugation of the fatty acid at the preferred N-terminus of the GDF15). The selective labeling of peptide and protein is described in further details in PCT application No. WO2015/200078.

### Nucleic Acids and Host Cells

[0182] The invention also relates to nucleic acids that encode the fusion polypeptides described herein as useful for administration for the present methods of treatment of the invention, including vectors that can be used to produce the fusion polypeptides. The nucleic acids are isolated and/or recombinant. In certain embodiments, the nucleic acid encodes a fusion polypeptide in which HSA or a functional variant thereof is located N-terminally to human mature GDF15 or a functional variant thereof. If desired the nucleic acid can further encode a linker (e.g., a flexible peptide linker) that bonds the C-terminus of the HSA or a functional variant thereof to the N-terminus of human mature GDF15 or a functional variant thereof. If desired, the nucleic acid can also encode a leader, or signal, sequence to direct cellular processing and secretion of the fusion polypeptide.

[0183] In preferred embodiments, the nucleic acid encodes a fusion polypeptide in which the SA moiety is HSA or a functional variant thereof and the GDF15 moiety is the mature human GDF peptide or a functional variant thereof. When present, the optional linker is preferably a flexible peptide linker. In particular embodiments, the nucleic acid encodes a fusion polypeptide that comprises A) an SA moiety selected from the group consisting of HSA(25-609) (SEQ ID NO:4), and HSA(25-609) in which Cys34 is replaced with Ser and Asn503 is replaced with Gln; and

[0184] B) a GDF15 moiety selected from the group consisting of:
[0185] human GDF15(197-308) (SEQ ID NO:5);
[0186] human GDF15(211-308) (amino acids 211-308 of SEQ ID NO:2);
[0187] human GDF15(197-308) (SEQ ID NO:5) in which Cys203 is replaced with Ser (C2035) and Cys210 is replaced with Ser (C210S); and
[0188] human GDF15(197-308) (SEQ ID NO:5) in which Cys273 is replaced with Ser (C273S).

[0189] If desired, the encoded fusion polypeptide can further comprise a linker that links the C-terminus of the SA moiety to the N-terminus of the GDF15 moiety. Preferably, the linker is selected from (GGGGS)n (SEQ ID NO: 303) and (GPPGS)n (SEQ ID NO:304) and (GPPGS)n (SEQ ID NO:304), wherein n is one to about 20. Preferred linkers include ((GGGGS)n (SEQ ID NO:303) and (GPPGS)n (SEQ ID NO:304), wherein n is 1, 2, 3 or 4.

[0190] For expression in host cells, the nucleic acid encoding a fusion polypeptide can be present in a suitable vector and after introduction into a suitable host, the sequence can be expressed to produce the encoded fusion polypeptide according to standard cloning and expression techniques, which are known in the art (e.g., as described in Sambrook, J., Fritsh, E. F., and Maniatis, T. Molecular Cloning: A Laboratory Manual 2^{nd}, ed., Cold Spring Harbor Laboratory, Cold Spring Harbor Laboratory Press, Cold Spring Harbor, N.Y., 1989). The invention also relates to such vectors comprising a nucleic acid sequence according to the invention.

[0191] A recombinant expression vector can be designed for expression of a GDF15 fusion polypeptide in prokaryotic (e.g., E. coli) or eukaryotic cells (e.g., insect cells, yeast cells, or mammalian cells). Representative host cells include many E. coli strains, mammalian cell lines, such as CHO, CHO-K1, and HEK293; insect cells, such as Sf9 cells; and yeast cells, such as S. cerevisiae and P. pastoris. Alternatively, the recombinant expression vector can be transcribed and translated in vitro, for example using T7 promoter regulatory sequences and T7 polymerase and an in vitro translation system. Vectors suitable for expression in host cells and cell-free in vitro systems are well known in the art. Generally such a vector contains one or more expression control elements that are operably linked to the sequence encoding the fusion polypeptide. Expression control elements include, for example, promoters, enhancers, splice sites, poly adenylation signals and the like. Usually a promoter is located upstream and operably linked to the nucleic acid sequence encoding the fusion polypeptide. The vector can comprise or be associated with any suitable promoter, enhancer, and other expression-control elements. Examples of such elements include strong expression promoters (e.g., a human CMV IE promoter/enhancer, an RSV promoter, SV40 promoter, SL3-3 promoter, MMTV promoter, or HIV LTR promoter, EF1 alpha promoter, CAG promoter) and effective poly (A) termination sequences. Additional elements that can be present in a vector to facilitate cloning and propagation include, for example, an origin of replication for plasmid product in E. coli, an antibiotic resistance gene as a selectable marker, and/or a convenient cloning site (e.g., a polylinker).

[0192] In another aspect of the instant disclosure, host cells comprising the nucleic acids and vectors disclosed herein are provided. In various embodiments, the vector or nucleic acid is integrated into the host cell genome, which in other embodiments the vector or nucleic acid is extra-chromosomal. If desired the host cells can be isolated.

[0193] Recombinant cells, such as yeast, bacterial (e.g., E. coli), and mammalian cells (e.g., immortalized mammalian cells) comprising such a nucleic acid, vector, or combinations of either or both thereof are provided. In various embodiments, cells comprising a non-integrated nucleic acid, such as a plasmid, cosmid, phagemid, or linear expression element, which comprises a sequence coding for expression of a fusion polypeptide comprising the human serum albumin or the functional variant thereof and human GDF15 protein or a functional variant thereof, are provided.

[0194] A vector comprising a nucleic acid sequence encoding a GDF15 fusion polypeptide provided herein can be introduced into a host cell using any suitable method, such as by transformation, transfection or transduction. Suitable methods are well known in the art. In one example, a nucleic acid encoding a fusion polypeptide comprising the human serum albumin or the functional variant thereof and human GDF15 protein or the functional variant thereof can be positioned in and/or delivered to a host cell or host animal via a viral vector. Any suitable viral vector can be used in this capacity.

[0195] The invention also provides a method for producing a fusion polypeptide as described herein, comprising maintaining a recombinant host cell comprising a recombinant nucleic acid of the invention under conditions suitable for expression of the recombinant nucleic acid, whereby the recombinant nucleic acid is expressed and a fusion polypeptide is produced. In some embodiments, the method further comprises isolating the fusion polypeptide.

### Therapeutic Methods and Pharmaceutical Compositions

[0196] The invention relates to methods for treating non-alcoholic fatty liver disease (NAFLD) and non-alcoholic steatohepatitis (NASH), as well as end-stage liver disease, hepatic steatosis (fatty liver), liver fibrosis, liver inflammation, liver cirrhosis, primary biliary cirrhosis (PBC), and hepatocellular carcinoma (HCC) in a subject in need thereof, said method comprising administering to the subject in need thereof an effective amount of, e.g, a GDF15 polypeptide, a GDF15 variant, GDF15 fusion polypeptide, or GDF15 FA conjugate (usually in the form of a pharmaceutical composition) as described herein.

[0197] Non-alcoholic fatty liver disease (NAFLD) is a disorder affecting as many as 1 in 3-5 adults and 1 in 10 children in the United States, and refers to conditions where there is an accumulation of excess fat in the liver of people who drink little or no alcohol. The most common form of NAFLD is a non-serious condition called hepatic steatosis (fatty liver), in which fat accumulates in the liver cells: although this is not normal, by itself it probably does not damage the liver. NAFLD most often presents itself in individuals with a constellation of risk factors called the metabolic syndrome, which is characterized by elevated fasting plasma glucose (FPG) with or without intolerance to post-prandial glucose, being overweight or obese, high blood lipids such as cholesterol and triglycerides (TGs) and low high-density lipoprotein cholesterol (HDL-C) levels, and high blood pressure; but not all patients have all the manifestations of the metabolic syndrome. Obesity is thought to be the most common cause of NAFLD; and some experts estimate that about two-thirds of obese adults and one-half of obese children may have fatty liver. The majority of individuals with NAFLD have no symptoms and a normal physical examination (although the liver may be slightly enlarged); children may exhibit symptoms such as abdominal pain and fatigue, and may show patchy dark skin discoloration (acanthosis nigricans). The diagnosis of NAFLD is usually first suspected in an overweight or obese person who is found to have mild elevations in their liver blood tests during routine testing, though NAFLD can be present with normal liver blood tests, or incidentally detected on imaging investigations such as abdominal ultrasound or CT scan. It is confirmed by imaging studies, most commonly a liver ultrasound or magnetic resonance imaging (MRI), and exclusion of other causes.

[0198] Some people with NAFLD may develop a more serious condition called non-alcoholic steatohepatitis (NASH): about 2-5 percent of adult Americans and up to 20 percent of those who are obese may suffer from NASH. In NASH, fat accumulation in the liver is associated with inflammation and different degrees of scarring. NASH is a potentially serious condition that carries a substantial risk of progression to end-stage liver disease, cirrhosis and hepatocellular carcinoma. Some patients who develop cirrhosis are at risk of liver failure and may eventually require a liver transplant.

[0199] NAFLD may be differentiated from NASH by the NAFLD Activity Score (NAS), the sum of the histopathology scores of a liver biopsy for steatosis (0 to 3), lobular inflammation (0 to 2), and hepatocellular ballooning (0 to 2). A NAS of <3 corresponds to NAFLD, 3-4 corresponds to borderline NASH, and >5 corresponds to NASH. The biopsy is also scored for fibrosis (0 to 4).

[0200] Non-alcoholic fatty liver disease (NAFLD) is a condition ranging from benign lipid accumulation in the liver (steatosis) to steatosis combined with inflammation. The latter is referred to as non-alcoholic steatohepatitis (NASH). NASH is viewed as the hepatic component of metabolic syndrome. Estimates from the USA are that 5.7% to 17% of all adults have NASH, while 17% to 33% of Americans have NAFLD [1, 2]. As obesity and insulin resistance reach epidemic proportions in industrialized countries, the prevalence of both NAFLD and NASH is increasing and is therefore considered to be a major health hazard [3]. Steatosis alone is considered a relatively benign condition for the liver itself and is also a reversible condition However, the transition towards NASH represents a key step in the pathogenesis, as it sets the stage for further damage to the liver, such as fibrosis, cirrhosis and liver cancer. While the mechanisms leading to steatosis are well described, little is known about the actual risk factors that drive hepatic inflammation during the progression to NASH. Consequently, therapeutic options are poor.

[0201] NASH is a leading cause of end-stage liver disease; while NAFLD, and to an even greater degree NASH, are intimately related to states of the metabolic syndrome, including insulin resistance (pre-diabetes) and type 2 diabetes mellitus (T2DM), and abdominal obesity. T2DM has been the most prominent predictor for a poor prognosis in NAFLD, whereas elevated liver enzymes are considered unreliable. NASH develops much more frequently in the presence of longstanding T2DM, and the majority of patients with cryptogenic cirrhosis are obese and/or diabetic. Studies have demonstrated that 60 percent of patients with T2DM and NAFLD had biopsy-proven NASH, and that advanced hepatic fibrosis was present in 75 percent of those with diabetes and hypertension compared to only 7 percent without either condition. Haukeland, “Abnormal glucose tolerance is a predictor of nonalcoholic steatohepatitis and fibrosis in patients with non-alcoholic fatty liver disease”, Scand J. Gastroenterol., 40, 1469-1477 (2005), reported that impaired glucose tolerance (IGT) and T2DM were the only independent risk factors for severe NAFLD and NASH, increasing the odds ratio almost 4-fold. Mofrad, “Clinical and histological spectrum of nonalcoholic fatty liver disease associated with normal ALT levels”, Hepatology, 37, 1286-1292 (2003), reported a study that demonstrated the lack of predictive value for elevated liver transaminases to diagnose NASH in patients with NAFLD and found T2DM to be the only factor independently associated with an increased risk of advanced fibrosis.

[0202] Thus, NASH is an overlooked complication of T2DM that is frequently associated with fibrosis and in approximately 10 percent of patients results in cirrhosis; while the risk of hepatocellular carcinoma is also increased in patients with T2DM and NASH. Patients with NAFLD and NASH usually demonstrate mixed dyslipidemia and the other metabolic derangements described above, including an atherogenic low-density lipoprotein (LDL) phenotype consisting of predominantly of small dense particles. Both metabolic syndrome and NAFLD/NASH are characterized by increased cardiovascular inflammation as measured by elevations in high sensitivity C-reactive protein (hsCRP) and other inflammatory cytokines.

[0203] “Non-alcoholic steatohepatitis” or NASH is a common liver disease, which resembles alcoholic liver disease, but occurs in people who drink little or no alcohol. The major feature in NASH is fat in the liver, along with inflammation and damage. NASH can lead to cirrhosis, in which the liver is permanently damaged and scarred and is no longer able to work properly. NASH affects 2 to 5 percent of the U.S. population. Currently, no specific therapies for NASH exist. An additional 10 to 20 percent of Americans have fat in their liver, but no substantial inflammation or liver damage, a condition called “non-alcoholic fatty liver disease” (NAFLD). Although having fat in the liver is not normal, by itself it probably causes little harm or permanent damage. If fat is suspected based on blood test results or scans of the liver, this problem is referred to as NAFLD. If a liver biopsy is performed in this case, it will show that some people have NASH while others have NAFLD.

[0204] NASH is usually first suspected in a person who is found to have elevations in liver tests that are included in routine blood test panels, such as alanine aminotransferase (ALT) or aspartate aminotransferase (AST). When further evaluation shows no apparent reason for liver disease (such as medications, viral hepatitis, or excessive use of alcohol) and when x rays or imaging studies of the liver show fat, NASH is suspected. NASH is diagnosed and separated from NAFLD by a liver biopsy. For a liver biopsy, a needle is inserted through the skin to remove a small piece of the liver. NASH is diagnosed when examination of the tissue with a microscope shows fat along with inflammation and damage to liver cells. If the tissue shows fat without inflammation and damage, NAFLD is diagnosed. An important piece of information learned from the biopsy is whether scar tissue has developed in the liver.

[0205] NASH can slowly worsen, causing scarring or fibrosis to appear and accumulate in the liver. As fibrosis worsens, cirrhosis develops; the liver becomes severely scarred, hardened, and unable to function normally. Once serious scarring or cirrhosis is present, few treatments can halt the progression. A person with cirrhosis experiences fluid retention, muscle wasting, bleeding from the intestines, and liver failure. Liver transplantation is the only treatment for advanced cirrhosis with liver failure, and transplantation is increasingly performed in people with NASH. For example, NASH ranks as one of the major causes of cirrhosis in the U.S.A., behind hepatitis C and alcoholic liver disease.

[0206] There are no drugs currently approved to prevent or treat NAFLD or NASH. A number of pharmacological interventions have been tried in NAFLD/NASH but with overall limited benefit. Antioxidant agents may arrest lipid peroxidation and cytoprotective agents stabilize phospholipid membranes, but agents tried unsuccessfully or with only modest benefit so far include ursodeoxycholic acid, vitamins E (a-tocopherol) and C, and pentoxifylline, among others. Weight-loss agents such as orlistat have had no significant benefit compared to just the use of diet and exercise to achieve weight loss (“weight loss alone”). Most weight-loss studies in NAFLD/NASH have been pilot studies of short duration and limited success, reporting only a modest improvement in necroinflammation or fibrosis. A randomized, double-blind, placebo-controlled 6-month trial (Belfort, “A placebo-controlled trial of pioglitazone in subjects with nonalcoholic steatohepatitis”, N. Engl. J. Med., 355, 2297-2307 (2006)) of weight loss alone against pioglitazone, a thiazolidinedione peroxisome proliferator-activated receptor-gamma (PPARgamma) agonist and insulin sensitizer, failed to demonstrate any improvement for weight loss alone, but treatment with pioglitazone improved glycemic control, insulin sensitivity, indicators of systemic inflammation (including hsCRP, tumor necrosis factor-a, and transforming growth factor-beta), and liver histology in patients with NASH and IGT or T2DM. Treatment with pioglitazone also ameliorated adipose, hepatic, and muscle IR, and was associated with an approximately 50 percent decrease in necroinflammation (p<0.002) and a 37 percent reduction in fibrosis (p=0.08) Improvement in hepatocellular injury and fibrosis has been recently reported in another controlled trial with pioglitazone of 12 months duration.

[0207] In contrast, while the first randomized clinical study with rosiglitazone, the other thiazolidinedione approved for diabetes treatment, in NASH demonstrated a reduction in IR, plasma alanine aminotransferase (ALT) levels and steatosis, rosiglitazone treatment had no significant effect on necrosis, inflammation, or fibrosis. A preliminary report of the 2-year, open-label follow-up of this trial was also disappointing, with no significant benefit from rosiglitazone treatment. Thus, the pharmacological agent with the most robust efficacy in NASH is pioglitazone. Unfortunately, pioglitazone is also associated with a significantly increased risk of weight gain, edema, congestive heart failure, and osteoporotic fractures in both women and men.

[0208] An effective amount of the fusion polypeptide, usually in the form of a pharmaceutical composition, is administered to a subject in need thereof. The fusion polypeptide can be administered in a single dose or multiple doses, and the amount administered and dosing regimen will depend upon the particular fusion protein selected, the severity of the subject's condition and other factors. A clinician of ordinary skill can determined appropriate dosing and dosage regimen based on a number of other factors, for example, the individual's age, sensitivity, tolerance and overall well-being.

[0209] The administration can be performed by any suitable route using suitable methods, such as parenterally (e.g., intravenous, subcutaneous, intraperitoneal, intramuscular, intrathecal injections or infusion), orally, topically, intranasally or by inhalation. Parental administration is generally preferred. Subcutaneous administration is preferred.

[0210] GDF15 conjugates or GDF15 fusion polypeptides of the present invention can be administered to the subject in need thereof alone or with one or more other agents. When the fusion polypeptide is administered with another agent, the agents can be administered concurrently or sequentially to provide overlap in the therapeutic effects of the agents. Examples of other agents that can be administered in combination with the fusion polypeptide include:

[0211] 1. Antidiabetic agents, such as insulin, insulin derivatives and mimetics; insulin secretagogues such as the sulfonylureas (e.g., chlorpropamide, tolazamide, acetohexamide, tolbutamide, glyburide, glimepiride, glipizide); glyburide and Amaryl; insulinotropic sulfonylurea receptor ligands such as meglitinides, e.g. nateglinide and repaglinide; thiazolidinediones (e.g., rosiglitazone (AVANDIA), troglitazone (REZULIN), pioglitazone (ACTOS), balaglitazone, rivoglitazone, netoglitazone, troglitazone, englitazone, ciglitazone, adaglitazone, darglitazone that enhance insulin action (e.g., by insulin sensitization), thus promoting glucose utilization in peripheral tissues; protein tyrosine phosphatase-1B (PTP-1B) inhibitors such as PTP-112; Cholesteryl ester transfer protein (CETP) inhibitors such as torcetrapib, GSK3 (glycogen synthase kinase-3) inhibitors such as SB-517955, SB-4195052, SB-216763, NN-57-05441 and NN-57-05445; RXR ligands such as GW-0791 and AGN-194204; sodium-dependent glucose cotransporter inhibitors such as T-1095; glycogen phosphorylase A inhibitors such as BAY R3401; biguanides such as metformin and other agents that act by promoting glucose utilization, reducing hepatic glucose production and/or diminishing intestinal glucose output; alpha-glucosidase inhibitors such as acarbose and migiitoi) and other agents that slow down carbohydrate digestion and consequently absorption from the gut and reduce postprandial hyperglycemia; GLP-1 (glucagon like peptide-1), GLP-1 analogs such as Exendin-4 and GLP-1 mimetics; and DPPIV (dipeptidyl peptidase IV) inhibitors such as vildagliptin;

[0212] 2. Hypolipidemic agents such as 3-hydroxy-3-methyl-glutaryl coenzyme A (HMG-CoA) reductase inhibitors, e.g. lovastatin, pitavastatin, simvastatin, pravastatin, cerivastatin, mevastatin, velostatin, fluvastatin, dalvastatin, atorvastatin, rosuvastatin and rivastatin; squalene synthase inhibitors; FXR (farnesoid X receptor) and LXR (liver X receptor) ligands; bile acid sequenstrants, such as cholestyramine and colesevelam; fibrates; nicotinic acid and aspirin;

[0213] 3. Anti-obesity agents such as orlistat, rimonabant, phentermine, topiramate, qnexa, and locaserin;

[0214] 4. Anti-hypertensive agents, e.g. loop diuretics such as ethacrynic acid, furosemide and torsemide; angiotensin converting enzyme (ACE) inhibitors such as benazepril, captopril, enalapril, fosinopril, lisinopril, moexipril, perinodopril, quinapril, ramipril and trandolapril; inhibitors of the Na-K-ATPase membrane pump such as digoxin; neutralendopeptidase (NEP) inhibitors such as sacubitril; ACE/NEP inhibitors such as omapatrilat, sampatrilat and fasidotril; angiotensin II antagonists such as candesartan, eprosartan, irbesartan, losartan, telmisartan and valsartan, in particular valsartan; combinantions of NEP inhibitors and angiotensin II antagonists such as sacubitril and valsartan (i.e. Entresto); renin inhibitors such as ditekiren, zankiren, terlakiren, aliskiren, RO 66-1132 and RO-66-1168; β-adrenergic receptor blockers such as acebutolol, atenolol, betaxolol, bisoprolol, metoprolol, nadolol, propranolol, sotalol and timolol; inotropic agents such as digoxin, dobutamine and milrinone; calcium channel blockers such as amlodipine, bepridil, diltiazem, felodipine, nicardipine, nimodipine, nifedipine, nisoldipine and verapamil; aldosterone receptor antagonists; and aldosterone synthase inhibitors;

[0215] 5. Agonists of peroxisome proliferator-activator receptors, such as fenofibrate, pioglitazone, rosiglitazone, tesaglitazar, BMS-298585, L-796449, the compounds specifically described in the patent application WO 2004/103995 i.e. compounds of examples 1 to 35 or compounds specifically listed in claim 21, or the compounds specifically described in the patent application WO 03/043985 i.e. compounds of examples 1 to 7 or compounds specifically listed in claim 19 and especially (R)-1-{4-[5-methyl-2-(4-trifluoromethyl-phenyl)-oxazol-4-ylmethoxy]-benzenesulfonyl}-2,3-dihydro-1H-indole-2-carboxylic or a salt thereof; and

[0216] 6. The specific anti-diabetic compounds described in Expert Opin Investig Drugs 2003, 12(4): 623-633, FIGS. 1 to 7.

[0217] The invention also relates to pharmaceutical compositions comprising a GDF15 conjugate or a GDF15 fusion polypeptide as described herein (e.g., comprising a fusion polypeptide comprising human serum albumin or a functional variant thereof and human GDF15 protein or a functional variant thereof). Such pharmaceutical compositions can comprise a therapeutically effective amount of the fusion polypeptide and a pharmaceutically or physiologically acceptable carrier. The carrier is generally selected to be suitable for the intended mode of administration and can include agents for modifying, maintaining, or preserving, for example, the pH, osmolarity, viscosity, clarity, color, isotonicity, odor, sterility, stability, rate of dissolution or release, adsorption, or penetration of the composition. Typically, these carriers include aqueous or alcoholic/aqueous solutions, emulsions or suspensions, including saline and/or buffered media.

[0218] Suitable agents for inclusion in the pharmaceutical compositions include, but are not limited to, amino acids (such as glycine, glutamine, asparagine, arginine, or lysine), antimicrobials, antioxidants (such as ascorbic acid, sodium sulfite, or sodium hydrogen-sulfite), buffers (such as borate, bicarbonate, Tris-HCl, citrates, phosphates, or other organic acids), bulking agents (such as mannitol or glycine), chelating agents (such as ethylenediamine tetraacetic acid (EDTA)), complexing agents (such as caffeine, polyvinylpyrrolidone, beta-cyclodextrin, or hydroxypropyl-beta-cyclodextrin), fillers, monosaccharides, disaccharides, and other carbohydrates (such as glucose, mannose, or dextrins), proteins (such as free serum albumin, gelatin, or immunoglobulins), coloring, flavoring and diluting agents, emulsifying agents, hydrophilic polymers (such as polyvinylpyrrolidone), low molecular weight polypeptides, salt-forming counterions (such as sodium), preservatives (such as benzalkonium chloride, benzoic acid, salicylic acid, thimerosal, phenethyl alcohol, methylparaben, propylparaben, chlorhexidine, sorbic acid, or hydrogen peroxide), solvents (such as glycerin, propylene glycol, or polyethylene glycol), sugar alcohols (such as mannitol or sorbitol), suspending agents, surfactants or wetting agents (such as pluronics; PEG; sorbitan esters; polysorbates such as Polysorbate 20 or Polysorbate 80; Triton; tromethamine; lecithin; cholesterol or tyloxapal), stability enhancing agents (such as sucrose or sorbitol), tonicity enhancing agents (such as alkali metal halides, such as sodium or potassium chloride, or mannitol sorbitol), delivery vehicles, diluents, excipients and/or pharmaceutical adjuvants

[0219] Parenteral vehicles include sodium chloride solution, Ringer's dextrose, dextrose and sodium chloride and lactated Ringer's. Suitable physiologically-acceptable thickeners such as carboxymethylcellulose, polyvinylpyrrolidone, gelatin and alginates may be included. Intravenous vehicles include fluid and nutrient replenishers and electrolyte replenishers, such as those based on Ringer's dextrose. In some cases it will be preferable to include agents to adjust tonicity of the composition, for example, sugars, polyalcohols such as mannitol, sorbitol, or sodium chloride in a pharmaceutical composition. For example, in many cases it is desirable that the composition is substantially isotonic. Preservatives and other additives, such as antimicrobials, antioxidants, chelating agents and inert gases, may also be present. The precise formulation will depend on the route of administration. Additional relevant principle, methods and components for pharmaceutical formulations are well known. (See, e.g., Allen, Loyd V. Ed, (2012) Remington's Pharmaceutical Sciences, 22th Edition)

[0220] When parenteral administration is contemplated, the pharmaceutical compositions are usually in the form of a sterile, pyrogen-free, parenterally acceptable composition. A particularly suitable vehicle for parenteral injection is a sterile, isotonic solution, properly preserved. The pharmaceutical composition can be in the form of a lyophilizate, such as a lyophilized cake.

[0221] In certain embodiments, the pharmaceutical composition is for subcutaneous administration. Suitable formulation components and methods for subcutaneous administration of polypeptide therapeutics (e.g., antibodies, fusion proteins and the like) are known in the art. See, e.g., Published United States Patent Application No 2011/0044977 and U.S. Pat. No. 8,465,739 and U.S. Pat. No. 8,476,239. Typically, the pharmaceutical compositions for subcutaneous administration contain suitable stabilizers (e.g, amino acids, such as methionine, and or saccharides such as sucrose), buffering agents and tonicifying agents.

### Definitions

[0222] The term “amino acid mimetic,” as used herein, refers to chemical compounds that have a structure that is different from the general chemical structure of an amino acid, but functions in a manner similar to a naturally occurring amino acid.

[0223] “Conservative” amino acid replacements or substitutions refer to replacing one amino acid with another that has a side chain with similar size, shape and/or chemical characteristics. Examples of conservative amino acid replacements include replacing one amino acid with another amino acid within the following groups: 1) Alanine (A), Glycine (G); 2) Aspartic acid (D), Glutamic acid (E); 3) Asparagine (N), Glutamine (Q); 4) Arginine (R), Lysine (K); 5) Isoleucine (I), Leucine (L), Methionine (M), Valine (V); 6) Phenylalanine (F), Tyrosine (Y), Tryptophan (W); 7) Serine (S), Threonine (T); and 8) Cysteine (C), Methionine (M).

[0224] The term alkyl refers to a fully saturated branched or unbranched (or straight chain or linear) hydrocarbon moiety, comprising 1 to 50 carbon atoms. Preferably the alkyl comprises 5 to 20 carbon atoms, and more preferably 10 to 15 carbon atoms. For example C₁₀₋₁₅alkyl refers to an alkyl chain comprising 10 to 15 carbons. The term “alkylene” refer to a divalent alkyl as defined supra.

[0225] The term “alkenyl” refers to a branched or unbranched hydrocarbon having at least one carbon-carbon double bond. For example, the term “C₂₋₃₈-alkenyl” refers to a hydrocarbon having two to 38 carbon atoms and comprising at least one carbon-carbon triple

[0226] The term cycloalkyl refers to saturated or unsaturated but non-aromatic monocyclic, bicyclic or tricyclic hydrocarbon groups of 3-12 carbon atoms, preferably 3-8, or 3-7 carbon atoms. For bicyclic, and tricyclic cycloalkyl system, all rings are non-aromatic. For example, cycloalkyl encompasses cycloalkenyl and cycloalkynyl. The term “cycloalkenyl” refers to a bicyclic or tricyclic hydrocarbon group of 3-12 carbon atoms, having at least one carbon-carbon double bond. The term “cycloalkynyl” refers to a bicyclic or tricyclic hydrocarbon group of 3-12 carbon atoms, having at least one carbon-carbon triple bond.

[0227] The term heteroaryl includes monocyclic or bicyclic heteroaryl, containing from 5-10 ring members selected from carbon atoms and 1 to 5 heteroatoms, and each heteroatoms is independently selected from O, N or S wherein S and N may be oxidized to various oxidation states. For bicyclic heteroaryl system, the system is fully aromatic (i.e. all rings are aromatic).

[0228] The term heterocyclyl refers to a saturated or unsaturated non-aromatic (partially unsaturated but non-aromatic) monocyclic, bicyclic or tricyclic ring system which contains at least one heteroatom selected from O, S and N, where the N and S can also optionally be oxidized to various oxidation states. In one embodiment, heterocyclyl moiety represents a saturated monocyclic ring containing from 5-7 ring atoms and optionally containing a further heteroatom, selected from 0, S or N. The heterocyclic ring may be substituted with alkyl, halo, oxo, alkoxy, haloalkyl, haloalkoxy. In other embodiment, heterocyclyl is di- or tricyclic. For polycyclic system, some ring may be aromatic and fused to saturated or partially saturated ring or rings. The overall fused system is not fully aromatic. For example, a heterocyclic ring system can be an aromatic heteroaryl ring fused with saturated or partially saturated cycloalkyl ring system.

[0229] The term aryl refers to monocyclic or bicyclic aromatic hydrocarbon groups having 6-10 carbon atoms in the ring portion. Representative examples of aryl are phenyl or naphthyl.

[0230] The term “effective amount” refers to an amount sufficient to achieve the desired therapeutic effect, under the conditions of administration, such as an amount sufficient to lower fasting plasma glucose (FPG), reduce weight, reduce blood lipids such as cholesterol and triglycerides (TGs), reduce liver enzymes, raise high-density lipoprotein cholesterol (HDL-C) levels, and lower blood pressure. For example, a “therapeutically-effective amount” of a GDF15 therapeutic agent administered to a patient exhibiting, suffering, or prone to suffer from NASH or NAFLD is such an amount which causes an improvement in the pathological symptoms, disease progression, physiological conditions associated with or induces resistance to succumbing to the afore mentioned disorders.

[0231] “Functional variant” and “biologically active variant” refer to a polypeptide that contains an amino acid sequence that differs from a reference polypeptide (e.g., HSA, human IgFc, human wild type mature GDF15 peptide) by sequence replacement, deletion, or addition (e.g. HSA or IgFc fusion polypeptide), and/or addition of non-polypeptide moieties (e.g. PEG, fatty acids) but retains desired functional activity of the reference polypeptide. The amino acid sequence of a functional variant can include one or more amino acid replacements, additions or deletions relative to the reference polypeptide, and include fragments of the reference polypeptide that retain the desired activity.

[0232] For example, a functional variant of SA (e.g., HSA) prolongs the serum half-life of the fusion polypeptides described herein in comparison to the half-life of GDF15, while retaining the reference GDF15 (e.g., human GDF15) polypeptide's activity (e.g., weight loss, appetite suppressing, insulin release, insulin sensitivity, and/or fat mass reduction) activity. Polypeptide variants possessing a somewhat decreased level of activity relative to their wild-type versions can nonetheless be considered to be functional or biologically active polypeptide variants, although ideally a biologically active polypeptide possesses similar or enhanced biological properties relative to its wild-type protein counterpart (a protein that contains the reference amino acid sequence).

[0233] “Identity” means, in relation to nucleotide or amino acid sequence of a nucleic acid or polypeptide molecule, the overall relatedness between two such molecules. Calculation of the percent sequence identity (nucleotide or amino acid sequence identity) of two sequences, for example, can be performed by aligning the two sequences for optimal comparison purposes (e.g., gaps can be introduced in one or both of a first and a second nucleic acid or amino acid sequence for optimal alignment). The nucleotides or amino acids at corresponding positions are then compared. When a position in the first sequence is occupied by the same nucleotide or amino acid as the corresponding position in the second sequence, then the molecules are identical at that position. The percent identity between the two sequences is a function of the number of identical positions shared by the sequences, taking into account the number of gaps, and the length of each gap, which needs to be introduced for optimal alignment of the two sequences. The comparison of sequences and determination of percent identity between two sequences can be accomplished using a mathematical algorithm. For example, the percent identity between two sequences can be determined using methods such as those described by the National Center for Biotechnology Information (http://www.ncbi.nlm.nih.gov/). For example, the percent identity between two sequences can be determined using Clustal 2.0 multiple sequence alignment program and default parameters. Larkin M A et al. (2007) “Clustal W and Clustal X version 2.0.” Bioinformatics 23(21): 2947-2948.

[0234] The term “moiety,” as used herein, refers to a portion of a fusion polypeptide (e.g., HSA-GDF15) or fatty acid-conjugate described herein (e.g., AHA-(200-308)-hGDF15). The fusion proteins used in the methods of the present invention include, e.g., a GDF15 moiety, which contains an amino acid sequence derived from GDF15, and an SA moiety, which contains an amino acid sequence derived from SA. The fatty acid conjugates used in the methods of the present invention include, e.g., a GDF15 moiety, which contains an amino acid sequence derived from GDF15, and an fatty acid moiety, e.g., a fatty acid comprising one of the Formulae further described herein. The term “moiety” can also refer to a linker or functional molecule (e.g., PEG) comprising a fatty acid conjugate or fusion protein used in the methods of the present invention. The fusion protein optionally contains a linker moiety, which links the GDF15 moiety and the SA moiety, in the fusion polypeptide.

[0235] Without wishing to be bound by any particular theory, it is believed that the GDF15 moiety confers biological function of decreasing appetite, promoting weight loss and treating obesity and other metabolic diseases, while the SA moiety prolongs the serum half-life, improves expression and stability of the fusion polypeptides described herein.

[0236] The term “naturally occurring” when used in connection with biological materials such as nucleic acid molecules, polypeptides, host cells, and the like, refers to materials that are found in nature and are not manipulated by man. Similarly, “non-naturally occurring” as used herein refers to a material that is not found in nature or that has been structurally modified or synthesized by man. When used in connection with nucleotides, the term “naturally occurring” refers to the bases adenine (A), cytosine (C), guanine (G), thymine (T), and uracil (U). When used in connection with amino acids, the term “naturally occurring” refers to the 20 conventional amino acids (i.e., alanine (A), cysteine (C), aspartic acid (D), glutamic acid (E), phenylalanine (F), glycine (G), histidine (H), isoleucine (I), lysine (K), leucine (L), methionine (M), asparagine (N), proline (P), glutamine (Q), arginine (R), serine (S), threonine (T), valine (V), tryptophan (W), and tyrosine (Y)), as well as selenocysteine, pyrrolysine (PYL), and pyrroline-carboxy-lysine (PCL).

[0237] “Nonalcoholic steatohepatitis (NASH)” is a liver disease, not associated with alcohol consumption, characterized by fatty change of hepatocytes, accompanied by intralobular inflammation and fibrosis.

[0238] NASH is a common, often “silent”, liver disease. It resembles alcoholic liver disease, but occurs in people who drink little or no alcohol. The major feature in NASH is fat in the liver, along with inflammation and damage. Most people with NASH feel well and are not aware that they have a liver problem. Nevertheless, NASH can be severe and can lead to cirrhosis in which the liver is permanently damaged and scarred and no longer able to function properly.

[0239] NAFLD is a fatty liver disease common in chronic liver disease subjects. Excess liver fat can lead to liver complications. While not alcohol-related, these conditions can be related to obesity, diet, and other health-related issues.

[0240] Individuals with elevated liver enzymes and/or one having a fatty liver (e.g. determined by ultrasound or fatty liver index) are considered to have NASH or NAFLD. A reduction in enzymes, fat, or fatty liver index is an indicator of an improving or corrected condition.

[0241] “Alcoholic steatohepatitis (ASH)” is Alcoholic steatohepatitis (ASH) is a serious complication of alcoholic liver disease. The diagnosis of ASH requires the association of steatosis, evidence of hepatocellular injury with ballooning degeneration, and polynuclear neutrophil infiltration on liver biopsy.

[0242] NASH and ASH are advanced stages of non-alcoholic fatty liver disease (NAFLD) and alcoholic fatty liver disease (AFLD). NAFLD is characterized by excessive fat accumulation in the liver (steatosis), without any other evident causes of chronic liver diseases (viral, autoimmune, genetic, etc.), and with an alcohol consumption <20-30 g/day. On the contrary, AFLD is defined as the presence of steatosis and alcohol consumption >20-30 g/day. The most common phenotypic manifestations of primary NAFLD/NASH are overweight/obesity, visceral adiposity, type 2 diabetes, hypertriglyceridemia and hypertension.

[0243] As used herein, the terms “variant,” “mutant,” as well as any like terms, when used in reference to GDF15 or SA or specific versions thereof (e.g., “GDF15 variant,” “human GDF15 variant,” etc.) define protein or polypeptide sequences that comprise modifications, truncations, deletions, or other variants of naturally occurring (i.e., wild-type) protein or polypeptide counterparts or corresponding native sequences. “GDF15 variant,” for instance, is described relative to the wild-type (i.e., naturally occurring) GDF15 protein as described herein and known in the literature.

[0244] A “subject” is an individual to whom a GDF15 fusion polypeptide or GDF15 conjugate (e.g., usually in the form of a pharmaceutical composition) is administered. The subject is preferably a human, but “subject” includes pet and livestock animals, such as cows, sheep, goats, horses, dogs, cats, rabbits, guinea pigs, rats, mice or other bovine, ovine, equine, canine, feline, rodent or murine species, poultry and fish.

[0245] The term “GDF15 therapeutic agent” as used herein means a GDF15 polypeptide, GDF15 variant, GDF15 fusion protein, or GDF15 conjugate (e.g., a GDF15 fatty acid conjugate), or a pharmaceutical composition comprising one or more of the same, that is administered to a subject in order to treat non-alcoholic fatty liver disease (NAFLD) and non-alcoholic steatohepatitis (NASH), as well as related conditions that include but are not limited to alcoholic steatohepatitis (ASH), end-stage liver disease, hepatic steatosis (fatty liver), liver fibrosis, liver inflammation, liver cirrhosis, primary biliary cirrhosis (PBC), and hepatocellular carcinoma (HCC), or similar condition.

[0246] The terms “conjugate” and “fatty acid conjugate” are used interchangeably and are intended to refer to the entity formed as a result of a covalent attachment of a polypeptide or protein (or fragment and/or variant thereof) and a fatty acid moiety, optionally via a linker.

[0247] A “ribonucleic acid” (RNA) is a polymer of nucleotides linked by a phosphodiester bond, where each nucleotide contains ribose or a modification thereof as the sugar component. Each nucleotide contains an adenine (A), a guanine (G), a cytosine (C), a uracil (U) or a modification thereof as the base. The genetic information in a mRNA molecule is encoded in the sequence of the nucleotide bases of the mRNA molecule, which are arranged into codons consisting of three nucleotide bases each. Each codon encodes for a specific amino acid of the polypeptide, except for the stop codons, which terminate translation (protein synthesis). Within a living cell, mRNA is transported to a ribosome, the site of protein synthesis, where it provides the genetic information for protein synthesis synthesis (translation). For a fuller description, see, Alberts B et al. (2007) Molecular Biology of the Cell, Fifth Edition, Garland Science.

[0248] As used herein, the term “polypeptide” refers to a polymer of amino acid residues linked by peptide bonds, whether produced naturally or synthetically. Polypeptides of less than about 10 amino acid residues are commonly referred to as “peptides.” The term “peptide” is intended to indicate a sequence of two or more amino acids linked by peptide bonds, wherein said amino acids may be natural or unnatural. The term encompasses the terms polypeptides and proteins, which may consist of two or more peptides held together by covalent interactions, such as for instance cysteine bridges, or non-covalent interactions. The art-recognized three letter or one letter abbreviations are used to represent amino acid residues that constitute the peptides and polypeptides of the invention. Except when preceded with “D”, the amino acid is an L-amino acid. When the one letter abbreviation is a capital letter, it refers to the D-amino acid. When the one letter abbreviation is a lower case letter, it refers to the L-amino acid. Groups or strings or amino acid abbreviations are used to represent peptides. Peptides are indicated with the N-terminus on the left and the sequence is written from the N-terminus to the C-terminus.

[0249] Peptides of the invention contain non-natural amino acids (i.e., compounds that do not occur in nature) and other amino acid analogs as are known in the art may alternatively be employed.

[0250] Certain non-natural amino acids can be introduced by the technology described in Deiters et al., J Am Chem Soc 125:11782-11783, 2003; Wang and Schultz, Science 301:964-967, 2003; Wang et al., Science 292:498-500, 2001; Zhang et al., Science 303:371-373, 2004 or in U.S. Pat. No. 7,083,970. Briefly, some of these expression systems involve site-directed mutagenesis to introduce a nonsense codon, such as an amber TAG, into the open reading frame encoding a polypeptide of the invention. Such expression vectors are then introduced into a host that can utilize a tRNA specific for the introduced nonsense codon and charged with the non-natural amino acid of choice. Particular non-natural amino acids that are beneficial for purpose of conjugating moieties to the polypeptides of the invention include those with acetylene and azido side chains.

[0251] A “protein” is a macromolecule comprising one or more polypeptide chains. A protein may also comprise non-peptidic components, such as carbohydrate groups. Carbohydrates and other nonpeptidic substituents may be added to a protein by the cell in which the protein is produced, and will vary with the type of cell. Proteins are defined herein in terms of their amino acid backbone structures; substituents such as carbohydrate groups are generally not specified, but may be present nonetheless. A protein or polypeptide encoded by a non-host DNA molecule is a “heterologous” protein or polypeptide.

[0252] An “isolated polypeptide or isolated protein” is a polypeptide or protein (for example GDF15) that is essentially free from cellular components, such as carbohydrate, lipid, or other proteinaceous impurities associated with the polypeptide in nature. Typically, a preparation of isolated polypeptide or protein contains the polypeptide or protein in a highly purified form, i.e., at least about 80% pure, at least about 90% pure, at least about 95% pure, greater than 95% pure, such as 96%, 97%, or 98% or more pure, or greater than 99% pure. One way to show that a particular protein preparation contains an isolated polypeptide or protein is by the appearance of a single band following sodium dodecyl sulfate (SDS)-polyacrylamide gel electrophoresis of the protein preparation and Coomassie Brilliant Blue staining of the gel. However, the term “isolated” does not exclude the presence of the same polypeptide or protein in alternative physical forms, such as dimers or alternatively glycosylated or derivatized forms. Preferably, the isolated polypeptide is substantially free from any other contaminating polypeptides or other contaminants that are found in its natural environment that would interfere with its therapeutic, diagnostic, prophylactic or research use.

[0253] One of ordinary skill in the art will appreciate that various amino acid substitutions, e.g, conservative amino acid substitutions, may be made in the sequence of any of the polypeptide or protein described herein, without necessarily decreasing its activity. As used herein, “amino acid commonly used as a substitute thereof” includes conservative substitutions (i.e., substitutions with amino acids of comparable chemical characteristics). For the purposes of conservative substitution, the non-polar (hydrophobic) amino acids include alanine, leucine, isoleucine, valine, glycine, proline, phenylalanine, tryptophan and methionine. The polar (hydrophilic), neutral amino acids include serine, threonine, cysteine, tyrosine, asparagine, and glutamine. The positively charged (basic) amino acids include arginine, lysine and histidine. The negatively charged (acidic) amino acids include aspartic acid and glutamic acid. Examples of amino acid substitutions include substituting an L-amino acid for its corresponding D-amino acid, substituting cysteine for homocysteine or other non-natural amino acids having a thiol-containing side chain, substituting a lysine for homolysine, diaminobutyric acid, diaminopropionic acid, ornithine or other non-natural amino acids having an amino containing side chain, or substituting an alanine for norvaline or the like.

[0254] The term “amino acid,” as used herein, refers to naturally occurring amino acids, unnatural amino acids, amino acid analogues and amino acid mimetics that function in a manner similar to the naturally occurring amino acids, all in their D and L stereoisomers if their structure allows such stereoisomeric forms Amino acids are referred to herein by either their name, their commonly known three letter symbols or by the one-letter symbols recommended by the IUPAC-IUB Biochemical Nomenclature Commission.

[0255] The term “naturally occurring” refers to materials which are found in nature and are not manipulated by man. Similarly, “non-naturally occurring,” “un-natural,” and the like, as used herein, refers to a material that is not found in nature or that has been structurally modified or synthesized by man. When used in connection with amino acids, the term “naturally occurring” refers to the 20 conventional amino acids (i.e., alanine (A or Ala), cysteine (C or Cys), aspartic acid (D or Asp), glutamic acid (E or Glu), phenylalanine (F or Phe), glycine (G or Gly), histidine (H or His), isoleucine (I or Ile), lysine (K or Lys), leucine (L or Leu), methionine (M or Met), asparagine (N or Asn), proline (P or Pro), glutamine (Q or Gln), arginine (R or Arg), serine (S or Ser), threonine (T or Thr), valine (V or Val), tryptophan (W or Trp), and tyrosine (Y or Tyr)).

[0256] The terms “non-natural amino acid” and “unnatural amino acid,” as used herein, are interchangeably intended to represent amino acid structures that cannot be generated biosynthetically in any organism using unmodified or modified genes from any organism, whether the same or different. The terms refer to an amino acid residue that is not present in the naturally occurring (wild-type) protein sequence or the sequences of the present invention. These include, but are not limited to, modified amino acids and/or amino acid analogues that are not one of the 20 naturally occurring amino acids, selenocysteine, pyrrolysine (Pyl), or pyrroline-carboxy-lysine (Pcl, e.g., as described in PCT patent publication WO2010/48582). Such non-natural amino acid residues can be introduced by substitution of naturally occurring amino acids, and/or by insertion of non-natural amino acids into the naturally occurring (wild-type) protein sequence or the sequences of the invention. The non-natural amino acid residue also can be incorporated such that a desired functionality is imparted to the molecule, for example, the ability to link a functional moiety (e.g., PEG). When used in connection with amino acids, the symbol “U” shall mean “non-natural amino acid” and “unnatural amino acid,” as used herein.

[0257] The term “analogue” as used herein referring to a polypeptide or protein means a modified peptide or protein wherein one or more amino acid residues of the peptide/protein have been substituted by other amino acid residues and/or wherein one or more amino acid residues have been deleted from the peptide/protein and/or wherein one or more amino acid residues have been added the peptide/protein. Such addition or deletion of amino acid residues can take place at the N-terminal of the peptide and/or at the C-terminal of the peptide.

[0258] The terms “GDF15 polypeptide” and “GDF15 protein” are used interchangeably and mean a naturally-occurring wild-type polypeptide expressed in a mammal, such as a human or a mouse. For purposes of this disclosure, the term “GDF15 protein” can be used interchangeably to refer to any full-length GDF15 polypeptide, which consists of 308 amino acid residues; (NCBI Ref. Seq. NP_004855.2) containing a 20 amino acid signal peptide, a 167 amino acid pro-domain, and a mature domain of 112 amino acids which is excised from the prodomain by furin-like proteases. A 308-amino acid GDF15 polypeptide is referred to as “full-length” GDF15 polypeptide; a 112 amino acids GDF15 polypeptide (e.g. amino acids 197-308) is a “mature” GDF15 polypeptide. The mature GDF15 peptide contains the seven conserved cysteine residues required for the formation of the cysteine knot motif (having three intrachain disulfide bonds) and the single interchain disulfide bond that are typical for TGFβ superfamily members. The mature GDF15 peptide contains two additional cysteine residues that form a fourth intrachain disulfide bond and N-terminal loop. A GDF15 protein or polypeptide therefore also includes multimer, more particularly dimer of the protein.

[0259] The term “GDF15 variant” encompasses a GDF15 polypeptide in which a naturally occurring GDF15 polypeptide sequence has been modified. Such modifications include, but are not limited to, one or more amino acid substitutions, including substitutions with non-naturally occurring amino acids non-naturally-occurring amino acid analogs and amino acid mimetics.

[0260] In one aspect, the term “GDF15 variant” refers to a GDF15 protein sequence in which at least one residue normally found at a given position of a native GDF15 polypeptide is deleted or is replaced by a residue not normally found at that position in the native GDF15 sequence. In some cases it will be desirable to replace a single residue normally found at a given position of a native GDF15 polypeptide with more than one residue that is not normally found at the position; in still other cases it may be desirable to maintain the native GDF15 polypeptide sequence and insert one or more residues at a given position in the protein; in still other cases it may be desirable to delete a given residue entirely; all of these constructs are encompassed by the term “GDF15 variant. The methods of the present invention also encompass nucleic acid molecules encoding such GDF15 variant polypeptide sequences.

[0261] In various embodiments, a GDF15 variant comprises an amino acid sequence that is at least about 85 percent identical to a naturally-occurring GDF15 protein. In other embodiments, a GDF15 polypeptide comprises an amino acid sequence that is at least about 90%, or about 95%, 96%, 97%, 98%, or 99% identical to a naturally-occurring GDF15 polypeptide amino acid sequence. Such GDF15 mutant polypeptides preferably, but need not, possess at least one activity of a wild-type GDF15 mutant polypeptide, such as the ability to lower blood glucose, insulin, triglyceride, or cholesterol levels; the ability to reduce body weight; or the ability to improve glucose tolerance, energy expenditure, or insulin sensitivity; the ability to treat, prevent, or ameliorate non-alcoholic fatty liver disease (NAFLD) and non-alcoholic steatohepatitis (NASH), as well as end-stage liver disease, hepatic steatosis (fatty liver), liver fibrosis, liver inflammation, liver cirrhosis, primary biliary cirrhosis (PBC), and hepatocellular carcinoma (HCC).

[0262] Although the GDF15 polypeptides and GDF15 mutant polypeptides, and the constructs comprising such polypeptides are primarily disclosed in terms of human GDF15, the invention is not so limited and extends to GDF15 polypeptides and GDF15 mutant polypeptides and the constructs comprising such polypeptides where the GDF15 polypeptides and GDF15 mutant polypeptides are derived from other species (e.g., cynomolgous monkeys, mice and rats). In some instances, a GDF15 polypeptide or a GDF15 mutant polypeptide can be used to treat or ameliorate a metabolic disorder in a subject in a mature form of a GDF15 mutant polypeptide that is derived from the same species as the subject.

[0263] A GDF15 mutant polypeptide is preferably biologically active. In various respective embodiments, a GDF15 polypeptide or a GDF15 mutant polypeptide has a biological activity that is equivalent to, greater to or less than that of the naturally occurring form of the mature GDF15 protein. Examples of biological activities include the ability to lower blood glucose, insulin, triglyceride, or cholesterol levels; the ability to reduce body weight; or the ability to improve glucose tolerance, lipid tolerance, or insulin sensitivity; the ability to lower urine glucose and protein excretion; the ability to treat non-alcoholic fatty liver disease (NAFLD) and non-alcoholic steatohepatitis (NASH), as well as end-stage liver disease, hepatic steatosis (fatty liver), liver fibrosis, liver inflammation, liver cirrhosis, primary biliary cirrhosis (PBC), and hepatocellular carcinoma (HCC).

[0264] As used herein in the context of the structure of a polypeptide or protein, the term “N-terminus” (or “amino terminus”) and “C-terminus” (or “carboxyl terminus”) refer to the extreme amino and carboxyl ends of the polypeptide, respectively.

[0265] The term “therapeutic polypeptide” or “therapeutic protein” as used herein means a polypeptide or protein which is being developed for therapeutic use, or which has been developed for therapeutic use.

### EXAMPLES

[0266] The following examples, including the experiments conducted and results achieved, are provided for illustrative purposes only and are not to be construed as limiting the present invention.

### Example 1: GDF15-Conjugate Improves Measures of Metabolic Disease Including Diabetes and Fatty Liver Disease in Obese Mice

[0267] Diet-induced obese mice were dosed once weekly with vehicle or fatty acid-GDF15 (0.5 mg/kg/s.c.) for 4 weeks. Non-fasted glucose and insulin were measured 2 weeks after the first dose, and overnight fasted blood glucose and insulin were measured 4 weeks after the first dose. Fatty acid-GDF15 reduced non-fasted glucose by 23% (207.1 mg/dl vehicle treated vs. 160.4 mg/dl fatty acid-GDF15; p<0.05). Fatty acid-GDF15 reduced non-fasted insulin levels by 75% compared to vehicle treated mice (2.1 vs 8.7 ng/ml; p<0.05). Four weeks after the initial dose, fatty acid-GDF15 reduced fasting blood glucose by 28% (142.7 vs. 199.5 mg/dl; p<0.05) and fasting insulin by 78% (0.77 vs. 3.5 ng/ml; p<0.05). Markers of fatty liver disease were also improved by four, once-weekly doses of fatty acid-GDF15. Fatty acid-GDF15 reduced hepatic steatosis by 57.5% (11.36 vs. 26.73% liver fat; p<0.05) and serum levels of a marker of hepatocyte damage, alanine aminotransferase (ALT), by 58% (46.2 vs. 110.5 U/L; p<0.05). In addition, fatty acid-GDF15 was shown to decrease the hepatic expression of PNPLA3, a causative gene in progressive liver diseases, by 77% (p<0.05), and to decrease the hepatic expression of COL1A1, or type I collagen, whose production correlates with liver fibrosis, by 57% (p<0.05). Treatment of diet-induced obese mice with a mouse serum albumin-GDF15 fusion protein (SEQ ID NO: 9) gave similar results for all of the study endpoints noted above for fatty acid-GDF15.

### Example 2: Fatty Acid-GDF15 Conjugate Improves Measures of Metabolic Disease Including Fatty Liver in Leptin-Deficient Ob/Ob Mice

[0268] Leptin-deficient obese (ob/ob) mice are predisposed to hepatic steatosis on a normal chow diet. However, on a diet high in trans-fat, fructose, and cholesterol (e.g. D09100301, Research Diets, Inc., New Brunswick, N.J.) the hepatic steatosis is exacerbated and liver fibrosis develops. Body weight as well as circulating cholesterol and liver enzymes also increase when ob/ob mice are fed the high trans-fat, fructose, and cholesterol diet. As such, this mouse strain and diet combination has been studied as a model of human NAFLD and NASH that is responsive to pharmacological intervention (Trevaskis J L, et al. (2012) Am J Physiol Gastrointest Liver Physiol 302:G762-G772). Exogenous GDF15 induces hypophagia and body weight loss in ob/ob mice (Johnen H, et al. (2007) Nat Med 13:1333-1340). We therefore tested the effect of GDF15 protein administration on measures of metabolic disease including fatty liver in ob/ob mice on the NAFLD and NASH-inducing high trans-fat, fructose, and cholesterol diet.

[0269] Six Week Study of Fatty Acid-GDF15 in Leptin-Deficient Ob/Ob Mice on a High Trans-Fat, High Fructose, and High Cholesterol Diet.

[0270] Leptin-deficient obese (ob/ob) mice were fed a diet high in trans-fat, fructose and cholesterol (D09100301, Research Diets, Inc., New Brunswick, N.J.) for 6 weeks. Following two weeks on diet, mice were injected subcutaneously once a week with either vehicle (30 mM NaOAc, pH 4.0), 0.0125 mg/kg fatty acid-GDF15 conjugate or 0.5 mg/k fatty acid-GDF15 conjugate for 4 weeks. Body weight and food intake were measured once weekly. Serum was collected two and four weeks post-treatment for serum chemistry analysis. Animals were subjected to a 4-hour fast prior to serum collection. Four weeks after the first injection, treatment with 0.0125 mg/kg fatty acid-GDF15 conjugate resulted in a 3% vehicle-adjusted body weight loss while treatment with 0.5 mg/kg fatty acid-GDF15 conjugated resulted in a 15% vehicle-adjusted weight loss (FIG. 1A). Body weight loss was consistent with a drop in cumulative food intake compared to vehicle controls during the first two weeks of treatment (10% in 0.0125 mg/kg group, 30% in 0.5 mg/kg group) (FIG. 1B).

[0271] Compared to vehicle-treated mice, treatment with 0.0125 mg/kg fatty acid-GDF15 conjugate reduced total liver weight and hepatic steatosis (measured on a Bruker minispec body composition analyzer) 10% and 5%, respectively while treatment with 0.5 mg/kg fatty acid-GDF15 conjugate reduced total liver weight and hepatic steatosis by 40% and 20%, respectively (FIGS. 2A-B). Treatment with 0.0125 mg/kg or 0.5 mg/kg fatty acid-GDF15 conjugate reduced serum markers of liver damage (ALT (30% and 45%, respectively), AST (29% and 31%, respectively) and ALP (12% and 28%, respectively)) compared to vehicle treated animals (measured on a Roche Diagnostics Cobas 6000 series analyzer) (Table 2). Treatment with 0.0125 mg/kg or 0.5 mg/kg fatty acid-GDF15 conjugate also reduced plasma triglyceride (13% and 36%, respectively) and cholesterol levels (4% and 18%, respectively) compared to vehicle treated animals (Table 3). Glucose levels were reduced by 17% in the 0.5 mg/kg group compared to vehicle treated animals.

TABLE 2
Terminal plasma liver enzyme levels

| | ALT (U/L) | AST (U/L) | ALP (U/L) |
|---|---|---|---|
| Treatment | mean (SEM) | mean (SEM) | mean (SEM) |
| Vehicle | 2264.4 (498.7) | 1180.0 (217.3) | 427.1 (15.8) |
| 0.0125 | 1578.0 (145.4) | 834.0 (51.8) | 377.3 (15.2) |
| mg/kg fatty | | | |
| acid-GDF15 | | | |
| 0.5 mg/kg | 1242.0 (71.6) | 809.8 (52.0) | 308.0 (13.8) |
| fatty acid- | | | |
| GDF15 | | | |

TABLE 3
Terminal plasma glucose, triglyceride, and cholesterol levels

| | Glucose | Triglycerides | Cholesterol |
|---|---|---|---|
| | (mmol/L) | (mmol/L) | (mmol/L) |
| Treatment | mean (SEM) | mean (SEM) | mean (SEM) |
| Vehicle | 13.59 (0.58) | 1.03 (0.05) | 11.31 (0.37) |
| 0.0125 | 13.83 (0.94) | 0.90 (0.05) | 10.89 (0.37) |
| mg/kg fatty | | | |
| acid-GDF15 | | | |
| 0.5 mg/kg | 11.24 (0.69) | 0.66 (0.02) | 9.30 (0.55) |
| fatty acid- | | | |
| GDF15 | | | |

[0272] Sixteen Week Study of Fatty Acid-GDF15 in Leptin-Deficient Ob/Ob Mice on a High Trans-Fat, High Fructose, and High Cholesterol Diet.

[0273] Leptin-deficient obese (ob/ob) mice were fed a diet high in trans-fat, fructose and cholesterol (D09100301, Research Diets, Inc., New Brunswick, N.J.) for 16 weeks. Following eight weeks on diet, mice were injected subcutaneously once a week with either vehicle (30 mM NaOAc, pH 4.0), 0.0125 mg/kg fatty acid-GDF15 conjugate or 0.5 mg/k fatty acid-GDF15 conjugate for eight weeks. Body weight and food intake were measured once weekly. Serum was collected two, five and 8 weeks post-treatment for serum chemistry analysis. Animals were subjected to a 4-hour fast prior to serum and tissue collection at eight weeks post-treatment. Eight weeks after the first injection, treatment with 0.0125 mg/kg fatty acid-GDF15 conjugate resulted in a 3% vehicle-adjusted body weight loss while treatment with 0.5 mg/kg fatty acid-GDF15 conjugated resulted in a 15% vehicle-adjusted weight loss (FIG. 3). Treatment with 0.0125 mg/kg or 0.5 mg/kg fatty acid-GDF15 conjugate reduced total liver weight (12% and 35%, respectively) compared to vehicle-treated mice (FIG. 4A). Hepatic steatosis was reduced by 16% in the 0.5 mg/kg group compared to vehicle treated controls (FIG. 4B). As seen in Table 4, ALP levels were also reduced by 10% in the 0.5 mg/kg group compared to vehicle treated controls.

TABLE 4
Terminal plasma alkaline phosphatase (ALP) levels

| Treatment | ALP (U/L) mean (SEM) |
|---|---|
| Vehicle | 361.1 (12.4) |
| 0.0125 | 337.8 (11.5) |
| mg/kg fatty | |
| acid-GDF15 | |
| 0.5 mg/kg | 325.3 (9.5) |
| fatty acid- | |
| GDF15 | |

### Example 3: Expression and Purification of HSA Fusion Polypeptides

[0274] A. Mammalian Cell Expression and Purification

[0275] Constructs of human GDF15 were expressed in transiently transfected HEK293F cells. Briefly, a liter of HEK293F cells 1 mg of DNA and 3 mg of linear 25 kDa polyethylenimine were mixed in 100 mL of medium, incubated at room temperature for 10 minutes, and then added to the cells. The cells were incubated for 5 days post transfection at 37° C. at 125 rpm (50 mm throw) at 8% CO₂ at 80% humidity. The cells were removed by centrifugation for 20 minutes at 6,000×g at 4° C. The supernatant was filtered through a 0.8/0.2 μm membrane and buffer exchanged into 100 mM TRIS pH 8.0 by TFF. The GDF15 constructs were captured on a Q Sepharose anion exchange column and eluted in a 10 column volume gradient from 0-400 mM NaCl in 100 mM TRIS pH 8.0. The fractions containing GDF15 were further purified by size exclusion chromatography in 1×DPBS, 1.47 mM KH₂PO₄, 8.06 mM Na₂HPO₄-7H₂O, 137.9 mM NaCl, 2.67 mM KCl. The fractions containing GDF15 were flask frozen in liquid nitrogen and stored at −80° C.

[0276] Mammalian Cell Expression and Purification of HSA-GDF15 Fusion

[0277] Constructs of His-human GDF15 fusion proteins were expressed in transiently transfected HEK293F cells. Briefly, per 2.5 liters of HEK293F cells 2.5 mg of DNA and 7.5 mg of linear 25 kDa polyethylenimine were mixed in 250 mL of medium, incubated at room temperature for 10 minutes, and then added to the cells. The cells were incubated for 4 days post transfection at 37° C. at 125 rpm (50 mm throw) at 8% CO₂ at 80% humidity. The cells were removed by centrifugation for 20 minutes at 6,000×g at 4° C. The supernatant was filtered through a 0.8/0.2 μm membrane. 1 M citric acid pH 3 was added to the filtered supernatant to a final concentration of 135 mM, solid sodium chloride was added to a final concentration of 2 M, and the supernatant was filtered through a 0.22 μm membrane. 5 mL of phenyl sepharose resin were equilibrated in 100 mM citric acid, 2 M NaCl, pH 3 and added to the supernatant. The resin was incubated with the supernatant for 2 hours at room temperature and packed into a 5 cm gravity column. The resin was washed with 20 mL of 100 mM citric acid, 2 M NaCl, pH 3; 20 mL of 100 mM citric acid, 1.5 M NaCl, pH 3; 100 mM citric acid, 1 M NaCl, pH 3; 100 mM citric acid, 0.5 M NaCl, pH 3; 100 mM citric acid, pH 3; 100 mM citric acid, 20% ethanol, pH 3; and 100 mM citric acid, 50% ethanol, pH 3. The washes containing no NaCl were pooled. 2 M TRIS base added to the phenyl sepharose pool to a final concentration of 180 mM yielding a final pH of 7.5. 5 M NaCl was added to a final concentration of 150 mM. 160 μL of Ni Sepharose HP resin were equilibrated in PBS, added to the phenyl sepharose pool, and incubated for 1 hour at room temperature. The resin was packed into a 1 cm gravity column and washed with 20 mL of PBS followed by 1 mL of PBS+100 mM imidazole. The bound protein was eluted in 1 mL of PBS+500 mM imidazole. The fractions containing GDF15 were flash frozen in liquid nitrogen and stored at −80° C.

[0278] B. Yeast Expression and Purification

[0279] Constructs of human GDF15 were expressed in Pichia pastoris utilizing methanol induction. Plasmid DNA was linearized with SacI for use in transformation. The linearized DNA was transformed into Pichia pastoris strain SMD1168 and expressed in BMMY medium at pH 6 with 1% (v/v) methanol at 30° C. at 200 rpm (1 inch throw) for 4 days. Methanol was added to a final concentration of 1% (v/v) each day during expression. The cells were removed by centrifugation for 20 minutes at 5,000×g at 4° C. and the supernatant was filtered through a 0.22 μm membrane. An equal volume of 1 M citric acid, 3 M NaCl pH 2.75 was added to the filtered supernatant. Phenyl Sepharose 6 was added to the supernatant and the GDF15 was bound by incubation for 1 hour at room temperature while stiffing. The resin was packed into a gravity column and the flow-through was removed. The resin was washed with 25 column volumes of 0.5 M citric acid, 1.5 M NaCl pH 3, 5 column volumes of 100 mM citric acid pH 3, and 5 column volumes of 100 mM citric acid, 20% ethanol pH 3. The bound protein was eluted in 5×1 column volume of 100 mM citric acid, 50% ethanol, pH 3. The elution fractions containing GDF15 were combined, diluted 1:10 into 25 mM bis-TRIS pH 5, and filtered through a 0.22 μm membrane. SP Sepharose cation exchange resin was added to the GDF15 and incubated for 1 hour at room temperature. The resin was packed into a gravity column and the flow-through was removed. The column was washed with 50 column volumes of 25 mM bis-TRIS pH 5 and eluted in 10 column volumes of 50 mM sodium phosphate, 150 mM NaCl pH 6.2.

[0280] C. E. coli Expression

[0281] E coli produced GDF15 was fused to a modified autoprotease P20 from Classical swine fever virus and expressed in inclusion bodies. E. coli transformed with GDF15 plasmid DNA were grown for 60 hours at 30° C. in ZYP-5052 auto induction medium (Studier F. W., Protein Expression and Purification 41 (2005) 207-234). The cell pellet was harvested by centrifugation for 30 minutes at 5,000×g at 18° C. Per liter of culture, the pellet was resuspended in 250 mL of 100 mM TRIS pH 8, 150 mM NaCl, 3 mM EDTA, 0.01% (v/v) Triton X-100, 1 mg/mL lysozyme and incubated for 20 minutes at room temperature, rotating. 250 mL of 100 mM TRIS pH 8, 150 mM NaCl, 20 mM CaCl₂, 20 mM MgCl₂, 0.25 mg/mL DNase I was added followed by an incubation for 20 minutes at room temperature, stiffing.

[0282] The pellet was centrifuged for 15 minutes at 5,000×g at 18° C. and the supernatant was discarded. The pellet was resuspended in 500 mL of 2% (v/v) Triton X-100 and incubated for 20 minutes at room temperature, rotating. The pellet was centrifuged for 15 minutes at 5,000×g at 18° C. and the supernatant was discarded. The pellet was resuspended in 500 mL of 500 mM NaCl and incubated for 20 minutes at room temperature, rotating. The pellet was centrifuged for 20 minutes at 5,000×g at 18° C. and the supernatant was discarded. The pellet was resuspended in 500 mL of 100 mM TRIS pH 8, 150 mM NaCl, 20 mM CaCl₂, 20 mM MgCl₂, 0.25 mg/mL DNase I and incubated for 20 minutes at room temperature, rotating. The pellet was centrifuged for 20 minutes at 5,000×g at 18° C. and the supernatant was discarded. The pellet was resuspended in 500 mL of 80% (v/v) ethanol and incubated for 20 minutes at room temperature, rotating. The pellet was centrifuged for 20 minutes at 5,000×g at 18° C. and the supernatant was discarded. The pellet was resuspended in 500 mL 100 mM TRIS pH 8, 500 mM NaCl, 8 M urea and incubated for 1 hour at room temperature, rotating. 10 mL of Ni Sepharose High Performance resin were added and incubated at room temperature for 1 hour, rotating.

[0283] The resin was packed into a gravity column and the flow-through was discarded. The resin was washed with 25 column volumes of 100 mM TRIS pH 8, 500 mM NaCl, 8 M urea the 25 column volumes of 100 mM TRIS pH 8, 1 M NaCl, 2 M urea. The bound protein was eluted in 2×5 column volumes of 100 mM TRIS pH 8, 1 M NaCl, 2 M urea, 0.5 M imidazole. The eluted protein was diluted 1:10 into 1 M TRIS-base, 1 M NaCl, 0.2 M histidine, 10 mM TCEP, pH 8.5. The sample was stirred briefly to mix and incubated overnight at room temperature with no agitation. The sample was loaded over a 6 gram HLB cartridge, washed in 100 mL of 0.1% (v/v) formic acid in water, and eluted in 50 mL of 0.1% (v/v) formic acid in isopropanol. The HLB elution was diluted 1:20 into 1 liter of 50 mM HEPES, 500 mM NaCl, 2 mM TCEP, 8 M urea, pH 7.6. 10 mL of Ni Sepharose High Performance resin were added and incubated at room temperature for 1 hour, stiffing. The resin was packed into a gravity column and the flow-though was saved.

[0284] The Ni flow-through was loaded over a 6 gram HLB cartridge, washed in 100 mL of 0.1% (v/v) formic acid in water, and eluted in 50 mL of 0.1% (v/v) formic acid in isopropanol. The second HLB elution was diluted 1:20 into 1 liter of 100 mM TRIS pH 8, 0.5 M urea, 2 mM oxidized glutathione, 2 mM reduced glutathione. The sample was stirred briefly to mix and incubated overnight at room temperature with no agitation. 100 mL of 5 M NaCl were added to make a final concentration of 500 mM and the sample was loaded over a 6 gram HLB cartridge. The cartridge was washed with 100 mL of 0.1% (v/v) formic acid in water and eluted in 25 mL of 0.1% (v/v) formic acid in ethanol. The HLB elution was diluted 1:4 by the addition of 75 mL of 50 mM bis-TRIS pH 4.8 and 1 mL of SP Sepharose resin was added. The resin was incubated with the GDF15 for 1 hour at room temperature and the packed into a gravity column. The resin was washed with 1 mL of 50 mM bis-TRIS pH 4.8 and eluted in 3×1 mL of PBS pH 6.4. Fractions 1 and 2 were combined, flash frozen in liquid nitrogen, and stored at −80° C.

### Animal Studies

[0285] Animal Studies: All animal studies described in this document were approved by the Novartis Institutes for Biomedical Research Animal Care and Use Committee in accordance with local and federal regulations and guidelines. Male mice (C57BL/6NTac) fed either a standard laboratory chow diet or a 60% fat diet (Research Diets D12492i) from 6-weeks of age onward were purchased from Taconic. Upon arrival, mice were housed one animal per cage typically under a 12h:12h reverse light-dark cycle. Animals all received a minimum of 1 week acclimation prior to any use. Mice were typically studied between 3-5 months of age. Prior to being studied, mice were randomized (typically 1-day prior to the experimental period) based on body weight such that each group had a similar average body weight.

[0286] Hydrodynamic DNA injections: On the day of study, mice were placed in fresh cages, and the old food removed. Each study animal (diet-induced obese male mice) received a single hydrodynamic injection of plasmid DNA via tail vein. DNA (typically 3 micrograms/mouse) was diluted in sterile saline at a volume ˜6.5% of the animal's body weight and rapidly injected within ˜5-10 seconds Immediately after injection, pre-weighed fresh high-fat diet was added to each cage at the end of the procedures above. Food intake and body weight were measured at the indicated time points.

[0287] Recombinant GDF15 analogs: On the day of study, mice were placed in fresh cages, and the old food removed. Approximately 1h later and just prior to the dark cycle, mice received a subcutaneous dose of either vehicle (1×PBS) or a GDF15 analog at the indicated times. After all injections are completed, the mice were reweighed and a defined amount of food returned (˜50 g per mouse of standard chow or high-fat diet). Food intake and body weight were measured over the course of the study at the times indicated.

[0288] Plasma GDF15 exposure: In surrogate animals treated as described above, plasma was collected into EDTA coated tubes at the indicated times, and human GDF15 levels were measured by ELISA as per the manufacturer's instructions (R&D Systems Quantikine Human GDF15 Immunoassay; DGD150). This assay does not recognize endogenous mouse GDF15.

[0289] Body composition: In some animals, body composition was assessed by NMR (Bruker MiniSpec Model LF90ii) as per the manufacturer's instructions. The mass of fat tissue, lean tissue and free fluid was calculated using MiniSpec software V.2.59.rev.6.

### Results

[0290] All mammalian cell expressed constructs were secreted using the mouse Igκ chain V-III region MOPC 63 signal peptide with the exception of the mouse albumin domain 1 fusion and the non 3×4GS linkers (SEQ ID NO: 300) which were secreted using the human CD8A signal peptide. Yeast expressed constructs were secreted using a modified mating factor alpha-1 signal peptide.

[0291] GDF15 can cause or promote weight loss agent in mice. However, characteristics of GDF15 make the naturally occurring peptide unsuitable for use as a therapeutic in humans, such as the short lived plasma half-life (˜1h) of the wild-type human peptide and poor expression levels in mammalian cells (Fairlie W D, et. al. Gene (2000) 254:67-76). To help understand whether GDF15 can be modified to improve its properties, e.g., extend its plasma half-life, the inventors solved the crystal structure of the protein. The GDF15 crystal structure revealed a unique disulfide pattern for GDF15 compared to other members of the TGFbeta superfamily that contain the 9 conserved cysteine residues, such as TGFB1-3 and inhibin beta (Galat A Cell. Mol. Life Sci. (2011) 68:3437-3451). To test the functional importance of these disulfide bonds, mammalian expression vectors were constructed that encoded proteins where each of the conserved cysteine residues that make up the disulfide bonds were individually mutated to serine residues. The expression constructs were delivered by hydrodynamic DNA injection to diet-induced obese mice as described in the Material and Methods section. Mice injected with the expression vector encoding naturally occurring GDF15 ate 31.1% less food and were 31.3% lighter 3 weeks post treatment compared to mice injected with the empty vector. Mice receiving the expression vector encoding mutations at C203S, C210S, or C273S ate 27.9, 28.0, and 33.9% less food and weighed 25.5, 20.4, and 30.3% less, respectively, than the control mice receiving the empty vector. Mice receiving the expression vector encoding C203S, C210S, and C273S ate 27.9, 28.0, and 33.9% less food and weighed 25.5, 20.4, and 30.3% less, respectively, than the control mice receiving the empty vector. Food intake and body weight were similar among empty vector treated mice and mice treated with an expression vector encoding C2115, C240S, C244S, C274S, C3055, or C3075. These data demonstrate that the first disulfide bond between C203 and C210 is not required for efficacy and suggest the amino-terminus of mature GDF15 can be manipulated. Interestingly, C273, which forms the interchain disulfide bond, is also not required for efficacy of GDF15.

[0292] The structural data combined with the functional data from the cysteine mutagenesis studies suggested that the amino terminus of GDF15 and potentially the carboxy terminus could be modified to extend the half-life of GDF15. To test this, mammalian expression vectors were constructed that encoded N-terminal Fc-GDF15 and C-terminal fusion proteins as well as mature GDF15 protein. Mice receiving a single hydrodynamic injection of an expression vector encoding mature GDF15 consistently ate approximately 25% less food than mice receiving a hydrodynamic injection of empty vector (Table 5). By the end of 4 weeks these mice weighed 28.9% less than the control mice (Table 6). Mice injected with a vector encoding an N-terminal Fc-GDF15 fusion protein ate about 25% less food over the first two weeks than the empty vector treated mice; however, by week 3 Fc-GDF15 treated mice were eating similar amounts of food as controls.

[0293] Body weights of Fc-GDF15 treated mice also initially decreased but then started to rebound such that by 4 weeks post injection, the Fc-GDF15 mice only weighed 9.8 percent less than empty vector treated mice. In contrast, mice injected with a vector encoding a C-terminal GDF15-Fc fusion protein consumed similar levels of food and gained weight exactly like empty vector treated mice throughout the duration of the experiment. High plasma GDF15 levels were detected at 1 and 3 weeks post injection for the mature GDF15 treated group (2.6 and 1.8 nM, respectively). Plasma GDF15 levels were 2.8 nM one week post dose but were undetectable 3 weeks post injection of the vector encoding Fc-GDF15. No GDF15 was detected at any time in mice treated with the GDF15-Fc expression vector. In summary, these data indicate that the C-terminal fusion of GDF15 was inactive, while N-terminal fusion of GDF15 was active. However, the loss of expression of GDF15 in the Fc-GDF15 fusion group suggests that Fc fusions to GDF15 may not be suitable therapeutics.

TABLE 5
Weekly Food Consumption (gram)

| | Empty Vector | Mature GDF15 | Fc-GDF15 | GDF15-Fc |
|---|---|---|---|---|
| Week 1 | 15.1 ± 0.62 | 11.6 ± 0.34 (−22.3) | 11.7 ± 0.52 (−22.9) | 15.7 ± 0.69 (3.8) |
| Week 2 | 17.4 ± 0.73 | 13.1 ± 0.47 (−24.7) | 13.1 ± 2.64 (−24.8) | 17.5 ± 0.72 (0.2) |
| Week 3 | 18.0 ± 0.56 | 13.7 ± 0.51 (−24.1) | 16.8 ± 0.49 (−6.4) | 18.6 ± 0.54 (3.4) |
| Week 4 | 18.4 ± 0.6 | 14.1 ± 0.62 (−23.4) | 17.6 ± 0.18 (−4.3) | 18.1 ± 0.52 (−1.5) |

Mean ± SEM (Percent Change Relative to Empty Vector)

TABLE 6
Body Weight (grams)

| | Empty Vector | Mature GDF15 | Fc-GDF15 | GDF15-Fc |
|---|---|---|---|---|
| Baseline | 31.1 ± 1.1 | 31.7 ± 0.8 | 31.0 ± 0.7 | 31.6 ± 0.8 |
| Week 1 | 30.7 ± 1.1 | 28.9 ± 0.7 | 28.3 ± 0.8 | 31.7 ± 1.1 |
| Week 2 | 32.5 ± 1.5 | 27.7 ± 0.5 | 29.4 ± 0.6 | 33.3 ± 1.1 |
| Week 3 | 34.2 ± 1.7 | 26.6 ± 0.5 | 30.9 ± 0.5 | 35.5 ± 1.2 |
| Week 4 | 36.7 ± 1.8 | 26.1 ± 0.6 | 33.1 ± 0.6 | 37.3 ± 1.4 |

Mean ± SEM

[0294] Based upon the opposing dimerization orientations of Fc and GDF15 and the loss of detectable plasma GDF15 in the Fc-GDF15 group, we suspected that Fc-GDF15 fusion proteins would be prone to aggregation, likely resulting in animals mounting an immune response against the Fc-GDF15 fusion protein. To determine if Fc-GDF15 fusion proteins are prone to aggregation, an Fc-GDF15 fusion protein was expressed in HEK293 cells. While the Fc-GDF15 fusion protein was expressed, a large proportion of the protein migrated close to the origin when analyzed under non-reducing conditions on a polyacrylamide gel, consistent with aggregation of the protein. (FIG. 1a) Further analysis by size exclusion chromatography confirmed the protein was aggregated.

[0295] In studies to identify GDF15 fusion proteins that were active but did not aggregate mammalian expression vectors encoding an N-terminal human serum albumin-[GGGGS]₃-GDF15 (HSA-GDF15) fusion protein and a mouse serum albumin-[GGGGS]₃-GDF15 (MSA-GDF15) were transfected into HEK293 cells. Unlike the Fc-GDF15 fusion protein, both HSA-GDF15 and MSA-GDF15 migrated at the expected molecular weight when analyzed under non-reducing conditions on a polyacrylamide gel and by size exclusion chromatography. (FIG. 1b) Unexpectedly, expression of both albumin-GDF15 fusion proteins in mammalian cells was also about 1000× greater than that for the mature GDF15 protein.

[0296] To determine if fusion of albumin to the N-terminus of GDF15 resulted in an active protein, lean mice were dosed with a single subcutaneous injection of vehicle or 99 micrograms (˜0.6 nmol of dimer) of MSA-GDF15 (197-308), MSA-GDF15 (197-308, C203S, C210S), MSA-GDF15 (211-308), or MSA-GDF15 (197-308, C273S). Compared to vehicle treated animals, food intake was reduced by 34, 34, 42, and 25 percent in animals receiving MSA-GDF15 (197-308), MSA-GDF15 (197-308, C203S, C210S), MSA-GDF15 (197-308, C273S), and MSA-GDF15 (211-308), respectively. These data clearly demonstrate that fusion of albumin to the N-terminus of GDF15 results in biologically active protein.

[0297] Fusion of albumin to the N-terminus of GDF15 also greatly increased the plasma half-life compared to the mature GDF15. The plasma half-life of mature GDF15 was ˜1h while the plasma half-life of the N-terminal serum albumin-GDF15 fusion proteins was ˜50h. Once weekly administration of MSA-GDF15 for 3 consecutive weeks greatly enhanced weight loss in obese mice compared to mature GDF15 at equivalent doses (0.6 nmol dimer/mouse, s.c.). Twenty eight days after the first dose and 2-weeks after the previous dose, MSA-GDF15 treated mice lost 12.8 percent of their starting body weight while, over the same duration, vehicle treated and GDF15 treated mice increased their starting body weight by an additional 10.9% and 5.6%, respectively. Analysis of body composition indicated that the weight loss induced by MSA-GDF15 is largely from fat mass with sparing of lean mass. On day 23 post initiation of dosing, the fat mass of MSA-GDF15 treated mice was 18.3% compared to 25.2% and 24.5% for vehicle and GDF15 treated mice, respectively. Lean mass in MSA-GDF15 treated mice was 55.6% of their body weight compared 51.5% and 52% for vehicle treated and GDF15 treated mice, respectively.

[0298] The HSA-GDF15 fusion was also biologically active. Obese mice receiving a single subcutaneous dose (3 mg/kg s.c.) of HSA-GDF15 ate 31% less food over 24h than vehicle-treated controls while MSA-GDF15 treated mice ate 27% less than vehicle controls. HSA-GDF15 fusions with different peptide linkers between albumin and GDF15 were also biologically active. Obese mice which were treated with a single subcutaneous dose (3 mg/kg s.c.) of HSA-no linker-GDF15, HSA-GGGGS-GDF15, HSA-GPPGS ate 22, 27, and 21% less food over 24 hours than vehicle treated mice. In summary, these data indicate that fusion of albumin to the N-terminus of GDF15 with various linkers are biologically active.

[0299] The amino terminus of GDF15 contains potential proteolytic (R198) and deamidation sites (N199) that may adversely impact development (e.g., stability) of a therapeutic albumin-GDF15 fusion protein. To determine if these sites are required for GDF15 activity, a series of albumin-GDF15 mutants were produced and tested for in vivo activity. Obese mice were treated with a single subcutaneous dose (3 mg/kg s.c.) of HSA-GDF15, HSA-GDF15 (R198H), HSA-GDF15 (N199E) or HSA-GDF15 (R198H, N199A). Cumulative food intake over the course of 6 days was reduced by 29% in mice treated with HSA-GDF15 compared to vehicle controls. Food intake over the same time period was reduced by 35, 28, and 25% in obese mice treated with HSA-GDF15 (R198H), HSA-GDF15 (N199E) or HSA-GDF15 (R198H, N199A) relative to controls. Over the 6 days, the body weight of vehicle treated animals increased by 6.1%, while body weight was reduced by 4.7% in HSA-GDF15 treated mice. Body weight was reduced by 5.2, 4.4, and 3.2 in obese mice treated with HSA-GDF15 (R198H), HSA-GDF15 (N199E) or HSA-GDF15 (R198H, N199A), respectively. Thus, fusion proteins containing mutation of these potential post-translational modification sites in the amino terminus of GDF15 retain biological activity.

[0300] As the receptor(s) for GDF15 is unknown, a series of structure-guided site-directed mutants were designed to elucidate domains and residues essential for function and those amenable to modification. GDF15 contains the fingers domain, knuckle domain, wrist domain, the newly discovered N-terminal loop domain, and back-of-hand domain. GDF15 analogs that disrupt the newly discovered amino-terminus region of GDF15, e.g. MSA-GDF15(211-308) and MSA-GDF15 (C203S, C210S), still retain biological activity demonstrating that this loop is not required for activity. The knuckle, finger, and wrist region of TGFbeta superfamily members are known to be important for receptor binding and signaling. To determine if these regions of GDF15 are critical for activity, key surface residues were mutated to a large side-chain containing amino acid, arginine, to attempt to induce a loss of function. MSA-GDF15 fusion proteins containing mutations in GDF15 residues leucine 294 (knuckle), aspartic acid 289 (fingers), glutamine 247 (wrist), and serine 278 (back of hand) were produced and then dosed subcutaneously to obese mice (3 mg/kg s.c.).

[0301] A single subcutaneous injection of MSA-GDF15 reduced food intake over the course of 7 days by 30% compared to vehicle control. Food intake was also reduced relative to control by the finger region mutant (D289R), the wrist mutant (Q247R), and the back of the hand mutant (S278R) by 22, 14, and 24%, respectively. In contrast, the knuckle region mutant (L294R) increased food intake by 17% relative to control. Over the course of the 7 days, body weight increased in the vehicle and L294R treated mice (2.2 and 6.3% respectively) while body weight decreased in by 6.6, 5.7, 5.7, and 5.4% in the MSA-GDF15, MSA-GDF15 (D289R), MSA-GDF15 (Q247R), and MSA-GDF15 (S278R) treated mice, respectively. These data indicate that L294 and the knuckle region of GDF15 are critical for activity, and likely interact with the GDF15 receptor. Mutations in the other regions of GDF15 are tolerated.

### Example 4: Variant of hGDF15 (AHA-hGDF15) Conjugated to a Fatty Acid

[chemical structure]

### Intermediate 1: AHA-(200-308)-hGDF15

(SEQ ID NO: 41)

AHAGDHCPLGPGRCCRLHTVRASLEDLGWADWVLSPREVQVTMCIGACP
SQFRAANMHAQIKTSLHRLKPDTVPAPCCVPASYNPMVLIQKTDTGVSL
QTYDDLLAKDCHCI.

[0304] LCMS: Calculated mass(dimer): 24430: Observed mass (dimer): 24432

[0305] Expression of Human GDF-15 Proteins in E. coli Cells

[0306] E. coli strains BL21 (DE3) Gold (Stratagene) and Rosetta (DE3) pLysS cells (Novagen) were transformed with constructs 51 to 56 and construct MAHA-(200-308)-hGDF15 respectively, cloned into pET26b vectors. Transformed cells were grown under antibiotic selection first in 3 ml and then in 50 ml Luria Broth (Bacto-Tryptone 10 g/L, yeast extract 5 g/L, NaCl 5/L, glucose 6 g/L) until an OD600 of 1.5 was reached. The pre-cultures were used to inoculate two 1-L fermenters filled with Terrific Broth medium (NH4SO4 1.2 g/L, H2PO4 0.041 g/L, K2HPO4 0.052 g/L, Bacto-Tryptone 12 g/L, Yeast Extract 24 g/L). The cultures were induced by automatic addition of 1 mM isopropyl-beta-D-thiogalactopyranoside (IPTG) when pH increased above 7.1. Other fermentation parameters were: temp=37° C.; pH 7.0+/−0.2 adjusted by addition of 2N NaOH/H2SO4; pO2>30% with cascades of stirrer speed, air flow and oxygen addition. Five hours post induction the cultures were cooled to 10° C. and cells were harvested by centrifugation.

[0307] Purification and Refolding of GDF15 Variant

[0308] Inclusion Bodies

[0309] Recombinant coli pellets expressing the protein of interest were resuspended (5% w/v) in 50 mM NaH₂PO₄/150 mM NaCl/5 mM benzamidine.HCl/5 mM DTT, pH 8.0 at 4° C., homogenized and lysed by 2 passages through a French press (800 and 80 bar). Inclusion bodies (IBs) were isolated by centrifugation at 12′000 rpm for 60 min at 4° C.

[0310] Purification of Crude Unfolded Protein

[0311] IBs were solubilized (5% w/v) in 6 M guanidine/100 mM NaH₂PO₄/10 mM Tris/20 mM beta-mercaptoethanol, pH 8.0 and stirred for 2 hours at room temperature. Debris was removed by centrifugation at 12′000 rpm. The solubilized IBs were further purified on Ni-NTA-Superflow (the construct without His tag binds as well to this resin due to the high histidine content). After base-line washing with 6 M guanidine/100 mM NaH₂PO₄/10 mM Tris/5 mM beta-mercaptoethanol, pH 8.0, bound material was eluted with the same buffer adjusted to pH 4.5. The eluate was adjusted to pH 8.0, 100 mM DTT was added and the solution stirred over night at 4° C. The pH was then adjusted to 2 by addition of trifluoroacetic acid (TFA, 10% stock in water) and the solution further diluted 1:1 with 0.1% TFA in water. The crude protein solution was further purified by RP-HPLC (Poros) using a gradient of 0-50% acetonitrile in 50 min. The GDF-15 containing fractions were pooled and lyophilized.

[0312] Protein Folding

[0313] Method 1: Lyophilized material was dissolved at 2 mg/ml in 100 mM acetic acid, diluted 15-20 folds in folding buffer (100 mM CHES/1 M NaCl/30 mM CHAPS/5 mM GSH/0.5 mM GSSG/20% DMSO, pH 9.5, 4° C.) and the solution gently stirred during 3 days at 4° C. After 3 days 3 volumes of 100 mM acetic acid was added and the solution concentrated by ultrafiltration (5 kDa cut-off) to about 100-200 ml, diluted 10 fold with 100 mM acetic acid and re-concentrated. The refolded material was further purified by preparative RP-HPLC on a Vydac C4 column run at 50° C. (buffer A: 0.1% TFA in water; buffer B: 0.05% TFA in acetonitrile). After loading the column was washed with 15% buffer B and eluted with a gradient of 15% B to 65% B in 50 min Collected fractions containing the protein of interest were diluted with an equal volume of buffer A and lyophilized. Refolding yields were about 25% for both proteins.

[0314] Method 2: Protocol followed as in method 1 with folding buffer: 100 mM CHES, pH 9.4, 0.9 M arginine, 0.5 M NaCl, 1 mM EDTA, 2.5 mM GSH, 1 mM GSSG (final concentration).

[0315] Intermediate 2: Synthesis of the Fatty Acid Construct

[chemical structure]

### Step 1: 18-(benzyloxy)-18-oxooctadecanoic acid, Dibenzyl octadecanedioate

[chemical structure]

[0317] A solution of octadecanedioic acid (100 mg, 0.318 mmol) in THF (Volume: 5 mL) was cooled to 0° and EDC (0.084 mL, 0.477 mmol) and DMAP (3.89 mg, 0.032 mmol) were added. Benzyl alcohol (0.030 mL, 0.286 mmol) was added slowly dropwise and the reaction was slowly warmed to r.t. and stirred for 16 hours. LCMS analysis showed 25% desired product and 38%+2 by ELSD (Method A (see Table 7, below, for this and all Methods cited in this example)), Rₜ prod=1.18 min, M+H 405.1; Rₜ+2prod=1.49 min, M+H₂O 512.4). Reaction mixture solvent was removed and crude material was taken up in DCM. The organics were washed with 1M HCl (aq) (25 mL×3), giving a white solid. The organic layer was then washed with a saturated aqueous solution of sodium carbonate (25 mL×3), using brine to aid the separation. The organics were dried over Na₂SO₄, filtered and concentrated to a white film.

[0318] The crude material was dissolved in a minimal amount of 2:1 ACN/DMSO and loaded onto a 20 g C18 15 uM column for reverse phase chromatography. Purified over 0-100% ACN/H₂O (0.1% TFA) 24 min gradient. Fractions with desired product were pooled, concentrated, frozen and lyophilized to give 38.3 mg of white powder (28%). The material was identified as the desired product 18-(benzyloxy)-18-oxooctadecanoic acid (1). LCMS Method B, Rₜ=2.39 min, M+H 405.4). 1H NMR (400 MHz, Chloroform-d) δ 7.39-7.32 (m, 5H), 5.11 (s, 2H), 2.35 (t, J=7.6 Hz, 4H), 1.67-1.61 (m, 4H), 1.36-1.21 (m, 24H).

### Step 2: 1-benzyl 18-(2,5-dioxopyrrolidin-1-yl) octadecanedioate

[chemical structure]

[0320] To a solution (1, 38.8 mg, 0.096 mmol) in THF (Volume: 2 mL) was added N-hydroxysuccinimide (13.24 mg, 0.115 mmol), EDC (0.025 mL, 0.144 mmol) and DMAP (1.172 mg, 9.59 μmol). The reaction was stirred at r.t. under N₂ for 16 hours. LCMS analysis showed full consumption of starting material and formation of desired product (Method A, Rₜ=1.25 min, M+H 502.4). The solvent was removed and reaction mixture taken up in a minimal amount of ACN and loaded onto a 20 g C18 15 uM column for reverse phase chromatography. Purified over 0-100% ACN/H₂O (0.1% TFA) 24 min gradient. Fractions with desired product were pooled, concentrated, frozen and lyophilized, giving a fine white solid (35.9 mg, 71%). LCMS Method B, Rₜ=2.51 min, M+H 502.5, M+H₂O 519.5. 1H NMR (400 MHz, Chloroform-d) δ 7.41-7.32 (m, 5H), 5.11 (s, 2H), 2.83 (s, 4H), 2.60 (t, J=7.4 Hz, 2H), 2.35 (t, J=7.5 Hz, 2H), 1.73 (m, J=7.6 Hz, 4H), 1.25 (d, J=3.6 Hz, 24H).

### Step 3: (S)-5-((benzyloxy)carbonyl)-1-(9H-fluoren-9-yl)-3,8-dioxo-2,12,15-trioxa-4,9-diazaheptadecan-17-oic Acid

[chemical structure]

[0322] To a solution of N-alpha-Fmoc-L-glutamic acid alpha-benzyl ester (250 mg, 0.544 mmol) in THF (Volume: 9 mL, Ratio: 9) was added N-hydroxy succinimide (75 mg, 0.653 mmol), EDC (0.144 mL, 0.816 mmol) and DMAP (6.65 mg, 0.054 mmol). The reaction was stirred at r.t. under N₂ for 3 hours. LCMS analysis showed presence of starting material (Method C, SM Rₜ=1.23 min, M+H 460.2; prod Rₜ=1.30 min, M+H 557.2) and so a 0.25 eq of N-hydroxysuccinimide was added and the reaction stirred at r.t. under N₂ for 16 hours. LCMS analysis showed full conversion to NHS ester product (Method C, Rₜ=1.30 min, M+H 557.2). 2-(2-(2-aminoethoxy)ethoxy)acetic acid (98 mg, 0.598 mmol) was dissolved in water (Volume: 1.000 mL, Ratio: 1.000) and added to the reaction mixture followed by DIPEA (0.442 mL, 2.72 mmol). The reaction mixture was stirred at r.t. under N₂ for 16 hours. LCMS analysis showed formation of desired product with some hydrolyzed glutamic acid (Method C, Rₜ=1.15 min, M+H 605.3). The reaction mixture (189 mg) was taken up in 5% MeOH/EtOAc and transferred to a separatory funnel, then washed 3× with 50 mL portions of 0.1N HCl. The combined aqueous layers were extracted once with 50 mL 5% MeOH/EtOAc and organic layers combined, dried over Na₂SO₄, filtered and concentrated to a colorless film (130 mg, 69%). LCMS analysis showed majority product in material (Method D, Rₜ=2.43 min, M+H 605.3). Material was carried on to next step without further purification.

### Step 4: (S)-4-amino-3,7-dioxo-1-phenyl-2,11,14-trioxa-8-azahexadecan-16-oic acid

[chemical structure]

[0324] 3 is dissolved in 20% 4-Methyl piperidine/DMF solution (1 mL per 100 mg of material). The reaction is stirred at r.t. for one hour and then loaded onto 20 g C18 15 uM column for reverse phase chromatography. The crude material is purified over 0-100% ACN/H₂O (0.1% TFA) 24 min gradient. Fractions with desired product are pooled, concentrated, frozen and lyophilized.

### Step 5: (S)-22-((benzyloxy)carbonyl)-3,20,25-trioxo-1-phenyl-2,29,32-trioxa-21,26-diazatetratriacontan-34-oic acid

[chemical structure]

[0326] To a solution of 4 in THF (12 mmolar, 9:1 THF/H₂O) purged with N₂ is added a solution of 1-benzyl 18-(2,5-dioxopyrrolidin-1-yl) octadecanedioate (2, 1.2 eq.) in water. DIPEA (5 eq.) is added and the reaction is stirred under N₂ at r.t. for 16 hours. The solvent is removed and crude material taken up in a minimal amount of ACN and then loaded onto 20 g C18 15 uM column for reverse phase chromatography. The crude material is purified over 0-100% ACN/H₂O (0.1% TFA) 24 min gradient. Fractions with desired product are pooled, concentrated, frozen and lyophilized.

### Step 6: (S)-22-((benzyloxy)carbonyl)-3,20,25,34-tetraoxo-1-phenyl-2,29,32,38,41-pentaoxa-21,26,35-triazatritetracontan-43-oic acid

[chemical structure]

[0328] 5 is dissolved in THF (0.02 molar) under N₂ and N-hydroxysuccinimide (1.2 eq.), EDC (1.5 eq.) and DMAP (0.1 eq.) are added. The reaction is stirred under N₂ at r.t. for 16 hours to give the NHS-ester intermediate. A solution of 2-(2-(2-aminoethoxy)ethoxy)acetic acid (1.1 eq.) in water (9:1 THF/H₂O) and DIPEA (5 eq.) is added to the NHS-ester intermediate. The reaction is stirred at r.t. under N₂ for 16 hours. The solvent is removed and crude material taken up in a minimal amount of ACN and then loaded onto a 20 g C18 15 uM column for reverse phase chromatography. The crude material is purified over 0-100% ACN/H₂O (0.1% TFA) 24 min gradient. Fractions with desired product are pooled, concentrated, frozen and lyophilized.

### Step 7: 21,39-dibenzyl 1-(2,5-dioxopyrrolidin-1-yl) (S)-9,18,23-trioxo-2,5,11,14-tetraoxa-8,17,22-triazanonatriacontane-1,21,39-tricarboxylate

[chemical structure]

[0330] To a solution of 6 in dry THF (0.02 molar) under N₂ is added N-hydroxysuccinimide (1.2 eq.). The reaction is stirred under N₂ at r.t. for 16 hours. The reaction solvent is evaporated and crude material taken up in a minimal amount of ACN and then loaded onto 20 g C18 15 uM column for reverse phase chromatography. The crude material is purified over 0-100% ACN/H₂O (0.1% TFA) 24 min gradient. Fractions with desired product are pooled, concentrated, frozen and lyophilized.

### Step 8: (S)-22-carboxy-1-((2,5-dioxopyrrolidin-1-yl)oxy)-1,10,19,24-tetraoxo-3,6,12,15-tetraoxa-9,18,23-triazahentetracontan-41-oic acid

[chemical structure]

[0332] To a solution of 7 in dry THF (0.2 molar) flushed with N₂ is added Pd/C (10% activated on charcoal, 0.1 eq.). The reaction is stirred at r.t. under N₂ for ten minutes. The N₂ source is then closed and hydrogen added to the reaction flask. The hydrogen source is then removed and N₂ flow returned. The reaction is stirred at r.t. for 16 hours. The reaction mixture is filtered through a solvent-wet pad of celite and rinsed 3× with excess THF and resulting filtrate concentrated. The crude material is dissolved in a minimal amount of ACN/water and loaded onto a 20 g C18 15 uM column for reverse phase chromatography. The crude material is purified over 0-100% ACN/H₂O (0.1% TFA) 24 min gradient. Fractions with desired product are pooled, concentrated, frozen and lyophilized.

### Example 4A: Protein Conjugation with Fatty Acid Construct (Intermediate 2)

[chemical structure]

[0334] General Protein Conjugation Procedure:

[0335] A 10 mg/mL solution of fatty acid-NHS ester is prepared in water. A solution of AHA-hGDF15 (1.0 eq) in is diluted with 30 mM NaOAc pH 4.6 to give a final reaction concentration of 0.88 mg/mL. Fatty acid solution (10 eq. at 10 mg/mL) is added to the protein solution and reaction shaken at r.t. for 16 hours. The reaction mixture is purified.

[0336] In view of the homodimeric nature of hGDF15, a mixture of AHA-hGDF15+1 fatty acid and AHA-hGDF15+2 fatty acids can be obtained. The fatty acid construct (Intermediate 2) is linked at the N-terminus of one or of two of the monomeric units. Such mixture of conjugates could be represented as follow:

[chemical structure]

[0337] wherein the line between the 2 AHA-hGDF15 units is a disulfide bond.

TABLE 7
Methods for characterizing fatty acids of GDF15 conjugates

| | | |
|---|---|---|
| Method | Open Access | SQ2 RXNMON-Acidic-NonPolar |
| A | method Name | |
| | Column | ACQUITY UPLC ® BEH C18 2.1 × |
| | | 50 mm, 1.7 μm |
| | Column | 50 C. |
| | Temperature | |
| | Eluents | A: Water + 0.1% Formic Acid |
| | | B: ACN + 0.1% Formic Acid |
| | Flow Rate | 1 mL/min |
| | Gradient | 0-1.40 min 60% A; 1.40-2.06 min 2% A |
| | Mass | Single Quadrupole ESI scan range 120-1600 |
| | Spectrometer | |
| | HPLC | Waters Acquity |
| Method | Open Access | SQ2 ProductAnalysis-Acidic-NonPolar |
| B | method Name | |
| | Column | ACQUITY UPLC ® BEH C18 2.1 × |
| | | 50 mm, 1.7 μm |
| | Column | 50 C. |
| | Temperature | |
| | Eluents | A: Water + 0.1% Formic Acid |
| | | B: ACN + 0.1% Formic Acid |
| | Flow Rate | 1 mL/min |
| | Gradient | 0 min 60% A; 3.40 min 2% A; 5.15 min 2% A |
| | Mass | Single Quadrupole ESI scan range 120-1600 |
| | Spectrometer | |
| | HPLC | Waters Acquity |
| Method | Open Access | SQ2 RXNMON-Acidic |
| C | method Name | |
| | Column | ACQUITY UPLC ® BEH C18 2.1 × |
| | | 50 mm, 1.7 μm |
| | Column | 50 C. |
| | Temperature | |
| | Eluents | A: Water + 0.1% Formic Acid |
| | | B: ACN + 0.1% Formic Acid |
| | Flow Rate | 1 mL/min |
| | Gradient | 0 min 98% A; 1.76 min 2% A; 2.06 min 2% A |
| | Mass | Single Quadrupole ESI scan range 120-1600 |
| | Spectrometer | |
| | HPLC | Waters Acquity |
| Method | Open Access | SQ2 ProductAnalysis-Acidic |
| D | method Name | |
| | Column | ACQUITY UPLC ® BEH C18 2.1 × |
| | | 50 mm, 1.7 μm |
| | Column | 50 C. |
| | Temperature | |
| | Eluents | A: Water + 0.1% Formic Acid |
| | | B: ACN + 0.1% Formic Acid |
| | Flow Rate | 1 mL/min |
| | Gradient | 0 min 98% A; 1.76 min 2% A; 2.06 min 2% A |
| | Mass | Single Quadrupole ESI scan range 120-1600 |
| | Spectrometer | |
| | HPLC | Waters Acquity |

### Example 5A: His-hGDF15 (I-59) Conjugated to Intermediate 37

[chemical structure]

[0339] His-GDF15 (0.493 ml, 0.026 mol, 1.42 mg/ml) was added to 1.5 ml of 30 mM sodium acetate pH=4 buffer nhs fatty acid (0.221 mg, 0.132 umol, 10 mg/mL) was added to the solution. Overnight the reaction was not complete so 2.5 more equivalents of fatty acid NHS (0.110 mg, 0.066 umol, 10 mg/mL) were added and after 5 hrs Maldi showed+2 conjugate as major product. Product was purified by washing 5 times using amicon ultrafiltration 10 kD to give 565 ug of conjugate in 76% yield. MALDI: sm (18%), expected mass: 26468 observed mass: 26553; +1 fatty acid (38%) expected mass: 28022 observed mass: 28099; +2 fatty acid (40%) expected mass: 29576 observed mass: 29649; +3 fatty acid (4%) expected mass: 31130 observed mass: 31201.

### Example 5B: AHA-hGDF15 Conjugated with Intermediate 37

[chemical structure]

[0341] A 10 mg/mL solution of Intermediate 37 in molecular biology grade water was prepared. To AHA-hGDF15 (intermediate 57, 6.67 mg/mL in 30 mM NaOAc pH 4.0, 5.247 mL, 1.433 μmol) was added 30 mM NaOAc pH 4.6 (acceptable range 4.5-5.0) to give a final protein concentration of 0.88 mg/mL. Intermediate 37 (10 eq., 2.39 mL, 0.014 mmol) was added and the reaction was mixed at r.t. for 18 hours. Precipitate had formed in the reaction vial. The reaction mixture was split amongst 4×15 mL 10 kDa Amicon centrifugal filters and each was diluted to 15 mL with 30 mM NaOAc pH 4.0. The material was buffer exchanged 4× into 30 mM NaOAc pH 4.0 and samples were combined to a volume of 25.6 mL, agitating the precipitate in the filter with a pipette tip in between washes. Precipitate remained in solution so the mixture was let sit at 4° C. overnight. Concentration was measured by A280 (30040 cm⁻¹M⁻¹, 27538 g/mol) to be 1.62 mg/mL (100%). UPLC analysis showed 60% recovery of +1 and +2 products (Method J).

[0342] Example 5B crude mixture which was tested in vivo and reported in table 8:

TABLE 8

| Species | % observed |
|---|---|
| AHA-GDF15 | 29 |
| AHA-GDF15 + 1 FA | 27 |
| AHA-GDF15 + 2 FA | 33 |
| AHA-GDF15 + 3 FA | 11 |

[0343] AHA-hGDF15+1FA (Fatty acid) corresponds to a reaction at the N-terminus amino functionality on the one molecule of the GDF15 homodimer.

[0344] AHA-hGDF15+2FA (Fatty acid) corresponds to a reaction at the N-terminus amino functionality on the second molecule of the GDF15 homodimer.

[0345] AHA-hGDF15+3FA (Fatty acid) corresponds to a non-selective reaction at some other site of the GDF15 homodimer.

[0346] Purification:

[0347] The crude product was purified by reverse phase chromatography (Buffer A 0.1% TFA in water; Buffer B 0.1M TFA in ACN gradient; 99%-80% Buffer A) on a Waters BEH300 130 Å, 3.5 μm, 4.6 mm×100 mm flow rate 2.5 ml/min.

[0348] Fraction 1: Unreacted AHA-hGDF15: Rt=17.33 min

[0349] Fraction 2: (19B1): AHA-GDF15+1FA: Rt=20.2 min (approximately 15% yield)

[0350] Fraction 3: (19B2): AHA-GDF15+2FA: Rt=21.6 min (approximately 15% yield)

[0351] Fraction 4: (19B3): AHA-GDF15+3 FA: Rt=23.0 min (approximately 5% yield)

[0352] A 1:1 ratio mixture of 19B1 and 19B2 was prepared and tested (19Bm).

[0353] Alternatively the reaction may be carried out in 10 mM Na₂HPO₄-7H₂O and 30 mM NaOAc at a pH of 4.73: A 10 mg/mL solution of Intermediate 37 in molecular biology grade water was prepared. To AHA-hGDF15 (Intermediate 57, 12.04 mg/mL in 30 mM NaOAc pH 4.0, 4.15 μL, 0.002 μmol) was added 30 mM NaOAc 10 mM Na₂HPO₄-7H₂O pH 4.73 to give a final protein concentration of 0.88 mg/mL. Intermediate 37 (20 eq., 6.83 μL, 0.041 μmol) was added and the reaction was mixed at r.t. for 18 hours. The reaction mixture had turned cloudy with precipitate. UPLC analysis showed 58%+1 and +2 products (Method J).

TABLE 9

| Species | % observed |
|---|---|
| AHA-GDF15 | 0 |
| AHA-GDF15 + 1 FA | 11 |
| AHA-GDF15 + 2 FA | 47 |
| AHA-GDF15 + 3 FA | 34 |
| AHA-GDF15 + 4 FA | 7 |

[0354] The reaction may also be carried out in 30 mM NaOAc and 10 mM K₂HPO₄ at a pH of 4.6: A 10 mg/mL solution of intermediate 37 in molecular biology grade water was prepared. To AHA-hGDF15 (intermediate 57, 6.21 mg/mL in 30 mM NaOAc pH 4.0, 5.261 mL, 1.337 μmol) was added 30 mM NaOAc 10 mM K₂HPO₄ pH 4.6 (acceptable range 4.5-5.0) to give a final protein concentration of 0.88 mg/mL Intermediate 37 (10 eq., 68.3 μL, 0.409 μmop was added and the reaction was mixed at r.t. for 7 hours. The reaction mixture had turned cloudy with precipitate. The reaction mixture was split into four 9 mL portions in 15 mL 10 kDa Amicon centrifugal filter and diluted to 15 mL with 30 mM NaOAc pH 4.0. The material was buffer exchanged 4× into 30 mM NaOAc pH 4.0, agitating the precipitate between each wash with a pipette tip. The reaction mixture was concentrated to a volume of 75 mL. Precipitate remained so the material was stored at 4° C. for two days. Concentration was measured by A280 (30040 cm⁻¹M⁻¹, 27538 g/mol) to be 0.4 mg/mL (97%). UPLC analysis showed 61% recovery of +1 and +2 products.

TABLE 10

| Species | % observed |
|---|---|
| AHA-GDF15 | 34 |
| AHA-GDF15 + 1 FA | 34 |
| AHA-GDF15 + 2 FA | 27 |
| AHA-GDF15 + 3 FA | 5 |

### Reference Example 1: His-hGDF15 BCN (I-58) Conjugated to Intermediate PEG-Myristic Acid Construct

### Step 1

[chemical structure]

[0356] To a mixture of Azido-PEG23-Amine (30 mg, 0.027 mmol) and myristic NHS ester (Toronto Research Chemicals, cat # S69080) (12 mg, 0.037 mmol) was added DCM (1 mL) and DIPEA (13 uL), and the mixture was stirred at r.t. overnight. The mixture was purified by silica chromatography eluting with EtOAc/heptane (0-100%) then MeOH/DCM (0-10%) to give clean product at around 5% MeOH/DCM. LCMS: (Gradient: from 40 to 98% B in 1.4 min—flow 1 mL/min Eluent A: water+0.05% formic acid+3.75 mM ammonium acetate, Eluent B: acetonitrile+0.04% formic acid) LCMS: rt=2.20 (Method C) Mass +H calculated: 1354.71 Mass observed: 1354.4.

### Step 2

[chemical structure]

[0358] To a solution of BCN-hGDF15 (I-52: 800 uL, 0.25 mg/mL) was added a (2 mg/mL in DMSO, 6.3 uL, 10 eq), and the mixture was stirred at r.t. overnight. 1.1 mL 0.20 mg/mL in quantitative yield. (Maldi: +1 mass calculated: 28223 mass observed: 28640; +2 mass calculated: 29543; mass observed:29962, +3 mass calculated: 30863 mass observed:31426, +4 mass calculated: 32183 mass observed:32911).

### Reference Example 2: His-hGDF15-PEG23

[chemical structure]

TABLE 11

| Degree of Labelling | Calculated | Observed | % |
|---|---|---|---|
| His-hGDF15 | 26468 | 26360.3 | 5 |
| His-hGDF15-BCN | 26644 | n/a | 0 |
| His-hGDF15 + 1 PEG23 | 27567 | 28178.6 | 15 |
| His-hGDF15 + 2 PEG23 | 28666 | 29385.1 | 46 |
| His-hGDF15 + 3 PEG23 | 29765 | 30547.2 | 28 |
| His-hGDF15 + 4 PEG23 | 30864 | 31731.8 | 5 |

[0360] To a solution of His-hGDF15 BCN (159: 427 μL, 1.17 mg/mL, 0.019 μmop in 30 mM NaOAc pH 4.0 (427 μL) was added azido-dPEG₂₃-amine (Quanta Biodesign, 104 μg, 0.094 μmol). The reaction was mixed at r.t. for 16 hours at which point the mixture was exchanged into 30 mM NaOAc pH 4.0 using 10 kDa MWCO Amicon centrifugal filter by diluting and concentrating the sample 5 times to a volume of 140 μL. MALDI analysis showed full conversion to +1 through +4 products. The concentration was measured by A₂₈₀ (29090 M−1 cm−1, 27600 g/mol) to be 2.099 mg/mL (57%).

The application's sequence listing, which the Patent Office published only in electronic form, follows.

SEQUENCE LISTING (337 sequences)

SEQ ID NO: 1 - protein, 4 aa, Artificial Sequence
  source: /note="Description of Artificial Sequence: Synthetic peptide"
RGRR

SEQ ID NO: 2 - protein, 308 aa, Homo sapiens
MPGQELRTVNGSQMLLVLLVLSWLPHGGALSLAEASRASFPGPSELHSEDSRFRELRKRYEDLLTRLRANQSWEDSNTDLVPAPAVRILTPEVRLGSGGHLHLRISRAALPEGLPEASRLHRALFRLSPTASRSWDVTRPLRRQLSLARPQAPALHLRLSPPPSQSDQLLAESSSARPQLELHLRPQAARGRRRARARNGDHCPLGPGRCCRLHTVRASLEDLGWADWVLSPREVQVTMCIGACPSQFRAANMHAQIKTSLHRLKPDTVPAPCCVPASYNPMVLIQKTDTGVSLQTYDDLLAKDCHCI

SEQ ID NO: 3 - protein, 609 aa, Homo sapiens [sequence omitted]

SEQ ID NO: 4 - protein, 585 aa, Homo sapiens [sequence omitted]

SEQ ID NO: 5 - protein, 112 aa, Homo sapiens
ARNGDHCPLGPGRCCRLHTVRASLEDLGWADWVLSPREVQVTMCIGACPSQFRAANMHAQIKTSLHRLKPDTVPAPCCVPASYNPMVLIQKTDTGVSLQTYDDLLAKDCHCI

SEQ ID NO: 6 - protein, 118 aa, Artificial Sequence
  source: /note="Description of Artificial Sequence: Synthetic polypeptide"
HHHHHHARNGDHCPLGPGRCCRLHTVRASLEDLGWADWVLSPREVQVTMCIGACPSQFRAANMHAQIKTSLHRLKPDTVPAPCCVPASYNPMVLIQKTDTGVSLQTYDDLLAKDCHCI

SEQ ID NO: 7 - protein, 130 aa, Artificial Sequence
  source: /note="Description of Artificial Sequence: Synthetic polypeptide"
HHHHHHHHGGSENLYFQGARNGDHCPLGPGRCCRLHTVRASLEDLGWADWVLSPREVQVTMCIGACPSQFRAANMHAQIKTSLHRLKPDTVPAPCCVPASYNPMVLIQKTDTGVSLQTYDDLLAKDCHCI

SEQ ID NO: 8 - protein, 273 aa, Artificial Sequence
  source: /note="Description of Artificial Sequence: Synthetic polypeptide"
MHHHHHHQKPVGVEEPVYDTAGRPLFGNPSEVHPQSTLKLPHDRGEDDIETTLRDLPRKGDCRSGNHLGPVSGIYIKPGPVYYQDYTGPVYHRAPLEFFDETQFEETTKRIGRVTGSDGKLYHIYVEVDGEILLKQAKRGTPRTLKWTRNTTNCPLWVTSCARNGDHCPLGPGRCCRLHTVRASLEDLGWADWVLSPREVQVTMCIGACPSQFRAANMHAQIKTSLHRLKPDTVPAPCCVPASYNPMVLIQKTDTGVSLQTYDDLLAKDCHCI

SEQ ID NO: 9 - protein, 711 aa, Artificial Sequence
  source: /note="Description of Artificial Sequence: Synthetic polypeptide"
EAHKSEIAHRYNALGEQHFKGLVLIAFSQYLQKASYDEHAKLVQEVTDFAKTCVADESAANCDKSLHTLFGDKLCAIPNLRENYGELADCCTKQEPERNECFLQHKDDNPSLPPFERPEAEAMCTSFKENPTTFMGHYLHEVARRHPYFYAPELLYYAEQYNEILTQCCAEADKESCLTPKLDGVKEKALVSSVRQRMKCSSMQKFGERAFKAWAVARLSQTFPNADFAEITKLATDLTKVNKECCHGDLLECADDRAELAKYMCENQATISSKLQTCCDKPLLKKAHCLSEVEHDTMPADLPAIAADFVEDQEVCKNYAEAKDVFLGTFLYEYSRRHPDYSVSLLLRLAKKYEATLEKCCAEANPPACYGTVLAEFQPLVEEPKNLVKTNCDLYEKLGEYGFQNAILVRYTQKAPQVSTPTLVEAARNLGRVGTKCCTLPEDQRLPCVEDYLSAILNRVCLLHEKTPVSEHVTKCCSGSLVERRPCFSALTVDETYVPKEFKAETFTFHSDICTLPEKEKQIKKQTALAELVKHKPKATAEQLKTVMDDFAQFLDTCCKAADKDTCFSTEGPNLVTRAKDALAGGGGSGGGGSGGGGSARNGDHCPLGPGRCCRLHTVRASLEDLGWADWVLSPREVQVTMCIGACPSQFRAANMHAQIKTSLHRLKPDTVPAPCCVPASYNPMVLIQKTDTGVSLQTYDDLLAKDCHCI

SEQ ID NO: 10 - protein, 697 aa, Artificial Sequence
  source: /note="Description of Artificial Sequence: Synthetic polypeptide"
EAHKSEIAHRYNALGEQHFKGLVLIAFSQYLQKASYDEHAKLVQEVTDFAKTCVADESAANCDKSLHTLFGDKLCAIPNLRENYGELADCCTKQEPERNECFLQHKDDNPSLPPFERPEAEAMCTSFKENPTTFMGHYLHEVARRHPYFYAPELLYYAEQYNEILTQCCAEADKESCLTPKLDGVKEKALVSSVRQRMKCSSMQKFGERAFKAWAVARLSQTFPNADFAEITKLATDLTKVNKECCHGDLLECADDRAELAKYMCENQATISSKLQTCCDKPLLKKAHCLSEVEHDTMPADLPAIAADFVEDQEVCKNYAEAKDVFLGTFLYEYSRRHPDYSVSLLLRLAKKYEATLEKCCAEANPPACYGTVLAEFQPLVEEPKNLVKTNCDLYEKLGEYGFQNAILVRYTQKAPQVSTPTLVEAARNLGRVGTKCCTLPEDQRLPCVEDYLSAILNRVCLLHEKTPVSEHVTKCCSGSLVERRPCFSALTVDETYVPKEFKAETFTFHSDICTLPEKEKQIKKQTALAELVKHKPKATAEQLKTVMDDFAQFLDTCCKAADKDTCFSTEGPNLVTRAKDALAGGGGSGGGGSGGGGSCRLHTVRASLEDLGWADWVLSPREVQVTMCIGACPSQFRAANMHAQIKTSLHRLKPDTVPAPCCVPASYNPMVLIQKTDTGVSLQTYDDLLAKDCHCI

SEQ ID NO: 11 - protein, 698 aa, Artificial Sequence
  source: /note="Description of Artificial Sequence: Synthetic polypeptide"
DAHKSEVAHRFKDLGEENFKALVLIAFAQYLQQSPFEDHVKLVNEVTEFAKTCVADESAENCDKSLHTLFGDKLCTVATLRETYGEMADCCAKQEPERNECFLQHKDDNPNLPRLVRPEVDVMCTAFHDNEETFLKKYLYEIARRHPYFYAPELLFFAKRYKAAFTECCQAADKAACLLPKLDELRDEGKASSAKQRLKCASLQKFGERAFKAWAVARLSQRFPKAEFAEVSKLVTDLTKVHTECCHGDLLECADDRADLAKYICENQDSISSKLKECCEKPLLEKSHCIAEVENDEMPADLPSLAADFVESKDVCKNYAEAKDVFLGMFLYEYARRHPDYSVVLLLRLAKTYETTLEKCCAAADPHECYAKVFDEFKPLVEEPQNLIKQNCELFEQLGEYKFQNALLVRYTKKVPQVSTPTLVEVSRNLGKVGSKCCKHPEAKRMPCAEDYLSVVLNQLCVLHEKTPVSDRVTKCCTESLVNRRPCFSALEVDETYVPKEFQAETFTFHADICTLSEKERQIKKQTALVELVKHKPKATKEQLKAVMDDFAAFVEKCCKADDKETCFAEEGKKLVAASQAALGLGGGGSGGGGSGGGGSCRLHTVRASLEDLGWADWVLSPREVQVTMCIGACPSQFRAANMHAQIKTSLHRLKPDTVPAPCCVPASYNPMVLIQKTDTGVSLQTYDDLLAKDCHCI

SEQ ID NO: 12 - protein, 711 aa, Artificial Sequence
  source: /note="Description of Artificial Sequence: Synthetic polypeptide"
EAHKSEIAHRYNALGEQHFKGLVLIAFSQYLQKASYDEHAKLVQEVTDFAKTCVADESAANCDKSLHTLFGDKLCAIPNLRENYGELADCCTKQEPERNECFLQHKDDNPSLPPFERPEAEAMCTSFKENPTTFMGHYLHEVARRHPYFYAPELLYYAEQYNEILTQCCAEADKESCLTPKLDGVKEKALVSSVRQRMKCSSMQKFGERAFKAWAVARLSQTFPNADFAEITKLATDLTKVNKECCHGDLLECADDRAELAKYMCENQATISSKLQTCCDKPLLKKAHCLSEVEHDTMPADLPAIAADFVEDQEVCKNYAEAKDVFLGTFLYEYSRRHPDYSVSLLLRLAKKYEATLEKCCAEANPPACYGTVLAEFQPLVEEPKNLVKTNCDLYEKLGEYGFQNAILVRYTQKAPQVSTPTLVEAARNLGRVGTKCCTLPEDQRLPCVEDYLSAILNRVCLLHEKTPVSEHVTKCCSGSLVERRPCFSALTVDETYVPKEFKAETFTFHSDICTLPEKEKQIKKQTALAELVKHKPKATAEQLKTVMDDFAQFLDTCCKAADKDTCFSTEGPNLVTRAKDALAGGGGSGGGGSGGGGSARNGDHSPLGPGRSCRLHTVRASLEDLGWADWVLSPREVQVTMCIGACPSQFRAANMHAQIKTSLHRLKPDTVPAPCCVPASYNPMVLIQKTDTGVSLQTYDDLLAKDCHCI

SEQ ID NO: 13 - protein, 711 aa, Artificial Sequence
  source: /note="Description of Artificial Sequence: Synthetic polypeptide"
EAHKSEIAHRYNALGEQHFKGLVLIAFSQYLQKASYDEHAKLVQEVTDFAKTCVADESAANCDKSLHTLFGDKLCAIPNLRENYGELADCCTKQEPERNECFLQHKDDNPSLPPFERPEAEAMCTSFKENPTTFMGHYLHEVARRHPYFYAPELLYYAEQYNEILTQCCAEADKESCLTPKLDGVKEKALVSSVRQRMKCSSMQKFGERAFKAWAVARLSQTFPNADFAEITKLATDLTKVNKECCHGDLLECADDRAELAKYMCENQATISSKLQTCCDKPLLKKAHCLSEVEHDTMPADLPAIAADFVEDQEVCKNYAEAKDVFLGTFLYEYSRRHPDYSVSLLLRLAKKYEATLEKCCAEANPPACYGTVLAEFQPLVEEPKNLVKTNCDLYEKLGEYGFQNAILVRYTQKAPQVSTPTLVEAARNLGRVGTKCCTLPEDQRLPCVEDYLSAILNRVCLLHEKTPVSEHVTKCCSGSLVERRPCFSALTVDETYVPKEFKAETFTFHSDICTLPEKEKQIKKQTALAELVKHKPKATAEQLKTVMDDFAQFLDTCCKAADKDTCFSTEGPNLVTRAKDALAGGGGSGGGGSGGGGSARNGDHCPLGPGRCCRLHTVRASLEDLGWADWVLSPREVQVTMCIGACPSQFRAANMHAQIKTSLHRLKPDTVPAPSCVPASYNPMVLIQKTDTGVSLQTYDDLLAKDCHCI

SEQ ID NO: 14 - protein, 712 aa, Artificial Sequence
  source: /note="Description of Artificial Sequence: Synthetic polypeptide"
DAHKSEVAHRFKDLGEENFKALVLIAFAQYLQQCPFEDHVKLVNEVTEFAKTCVADESAENCDKSLHTLFGDKLCTVATLRETYGEMADCCAKQEPERNECFLQHKDDNPNLPRLVRPEVDVMCTAFHDNEETFLKKYLYEIARRHPYFYAPELLFFAKRYKAAFTECCQAADKAACLLPKLDELRDEGKASSAKQRLKCASLQKFGERAFKAWAVARLSQRFPKAEFAEVSKLVTDLTKVHTECCHGDLLECADDRADLAKYICENQDSISSKLKECCEKPLLEKSHCIAEVENDEMPADLPSLAADFVESKDVCKNYAEAKDVFLGMFLYEYARRHPDYSVVLLLRLAKTYETTLEKCCAAADPHECYAKVFDEFKPLVEEPQNLIKQNCELFEQLGEYKFQNALLVRYTKKVPQVSTPTLVEVSRNLGKVGSKCCKHPEAKRMPCAEDYLSVVLNQLCVLHEKTPVSDRVTKCCTESLVNRRPCFSALEVDETYVPKEFNAETFTFHADICTLSEKERQIKKQTALVELVKHKPKATKEQLKAVMDDFAAFVEKCCKADDKETCFAEEGKKLVAASQAALGLGGGGSGGGGSGGGGSARNGDHCPLGPGRCCRLHTVRASLEDLGWADWVLSPREVQVTMCIGACPSQFRAANMHAQIKTSLHRLKPDTVPAPCCVPASYNPMVLIQKTDTGVSLQTYDDLLAKDCHCI

SEQ ID NO: 15 - protein, 702 aa, Artificial Sequence
  source: /note="Description of Artificial Sequence: Synthetic polypeptide"
DAHKSEVAHRFKDLGEENFKALVLIAFAQYLQQCPFEDHVKLVNEVTEFAKTCVADESAENCDKSLHTLFGDKLCTVATLRETYGEMADCCAKQEPERNECFLQHKDDNPNLPRLVRPEVDVMCTAFHDNEETFLKKYLYEIARRHPYFYAPELLFFAKRYKAAFTECCQAADKAACLLPKLDELRDEGKASSAKQRLKCASLQKFGERAFKAWAVARLSQRFPKAEFAEVSKLVTDLTKVHTECCHGDLLECADDRADLAKYICENQDSISSKLKECCEKPLLEKSHCIAEVENDEMPADLPSLAADFVESKDVCKNYAEAKDVFLGMFLYEYARRHPDYSVVLLLRLAKTYETTLEKCCAAADPHECYAKVFDEFKPLVEEPQNLIKQNCELFEQLGEYKFQNALLVRYTKKVPQVSTPTLVEVSRNLGKVGSKCCKHPEAKRMPCAEDYLSVVLNQLCVLHEKTPVSDRVTKCCTESLVNRRPCFSALEVDETYVPKEFNAETFTFHADICTLSEKERQIKKQTALVELVKHKPKATKEQLKAVMDDFAAFVEKCCKADDKETCFAEEGKKLVAASQAALGLGGGGSARNGDHCPLGPGRCCRLHTVRASLEDLGWADWVLSPREVQVTMCIGACPSQFRAANMHAQIKTSLHRLKPDTVPAPCCVPASYNPMVLIQKTDTGVSLQTYDDLLAKDCHCI

SEQ ID NO: 16 - protein, 702 aa, Artificial Sequence
  source: /note="Description of Artificial Sequence: Synthetic polypeptide"
DAHKSEVAHRFKDLGEENFKALVLIAFAQYLQQCPFEDHVKLVNEVTEFAKTCVADESAENCDKSLHTLFGDKLCTVATLRETYGEMADCCAKQEPERNECFLQHKDDNPNLPRLVRPEVDVMCTAFHDNEETFLKKYLYEIARRHPYFYAPELLFFAKRYKAAFTECCQAADKAACLLPKLDELRDEGKASSAKQRLKCASLQKFGERAFKAWAVARLSQRFPKAEFAEVSKLVTDLTKVHTECCHGDLLECADDRADLAKYICENQDSISSKLKECCEKPLLEKSHCIAEVENDEMPADLPSLAADFVESKDVCKNYAEAKDVFLGMFLYEYARRHPDYSVVLLLRLAKTYETTLEKCCAAADPHECYAKVFDEFKPLVEEPQNLIKQNCELFEQLGEYKFQNALLVRYTKKVPQVSTPTLVEVSRNLGKVGSKCCKHPEAKRMPCAEDYLSVVLNQLCVLHEKTPVSDRVTKCCTESLVNRRPCFSALEVDETYVPKEFNAETFTFHADICTLSEKERQIKKQTALVELVKHKPKATKEQLKAVMDDFAAFVEKCCKADDKETCFAEEGKKLVAASQAALGLGPPGSARNGDHCPLGPGRCCRLHTVRASLEDLGWADWVLSPREVQVTMCIGACPSQFRAANMHAQIKTSLHRLKPDTVPAPCCVPASYNPMVLIQKTDTGVSLQTYDDLLAKDCHCI

SEQ ID NO: 17 - protein, 697 aa, Artificial Sequence
  source: /note="Description of Artificial Sequence: Synthetic polypeptide"
DAHKSEVAHRFKDLGEENFKALVLIAFAQYLQQCPFEDHVKLVNEVTEFAKTCVADESAENCDKSLHTLFGDKLCTVATLRETYGEMADCCAKQEPERNECFLQHKDDNPNLPRLVRPEVDVMCTAFHDNEETFLKKYLYEIARRHPYFYAPELLFFAKRYKAAFTECCQAADKAACLLPKLDELRDEGKASSAKQRLKCASLQKFGERAFKAWAVARLSQRFPKAEFAEVSKLVTDLTKVHTECCHGDLLECADDRADLAKYICENQDSISSKLKECCEKPLLEKSHCIAEVENDEMPADLPSLAADFVESKDVCKNYAEAKDVFLGMFLYEYARRHPDYSVVLLLRLAKTYETTLEKCCAAADPHECYAKVFDEFKPLVEEPQNLIKQNCELFEQLGEYKFQNALLVRYTKKVPQVSTPTLVEVSRNLGKVGSKCCKHPEAKRMPCAEDYLSVVLNQLCVLHEKTPVSDRVTKCCTESLVNRRPCFSALEVDETYVPKEFNAETFTFHADICTLSEKERQIKKQTALVELVKHKPKATKEQLKAVMDDFAAFVEKCCKADDKETCFAEEGKKLVAASQAALGLARNGDHCPLGPGRCCRLHTVRASLEDLGWADWVLSPREVQVTMCIGACPSQFRAANMHAQIKTSLHRLKPDTVPAPCCVPASYNPMVLIQKTDTGVSLQTYDDLLAKDCHCI

SEQ ID NO: 18 - protein, 324 aa, Artificial Sequence
  source: /note="Description of Artificial Sequence: Synthetic polypeptide"
EAHKSEIAHRYNDLGEQHFKGLVLIAFSQYLQKCSYDEHAKLVQEVTDFAKTCVADESAANCDKSLHTLFGDKLCAIPNLRENYGELADCCTKQEPERNECFLQHKDDNPSLPPFERPEAEAMCTSFKENPTTFMGHYLHEVARRHPYFYAPELLYYAEQYNEILTQCCAEADKESCLTPKLDGVKEKALVSSVRQRGGGGSGGGGSGGGGSARNGDHCPLGPGRCCRLHTVRASLEDLGWADWVLSPREVQVTMCIGACPSQFRAANMHAQIKTSLHRLKPDTVPAPCCVPASYNPMVLIQKTDTGVSLQTYDDLLAKDCHCI

SEQ ID NO: 19 - protein, 354 aa, Artificial Sequence
  source: /note="Description of Artificial Sequence: Synthetic polypeptide"
DKTHTCPPCPAPELLGGPSVFLFPPKPKDTLMISRTPEVTCVVVDVSHEDPEVKFNWYVDGVEVHNAKTKPREEQYNSTYRVVSVLTVLHQDWLNGKEYKCKVSNKALPAPIEKTISKAKGQPREPQVYTLPPSRDELTKNQVSLTCLVKGFYPSDIAVEWESNGQPENNYKTTPPVLDSDGSFFLYSKLTVDKSRWQQGNVFSCSVMHEALHNHYTQKSLSLSPGKGGGGSGGGGSGGGGSARNGDHCPLGPGRCCRLHTVRASLEDLGWADWVLSPREVQVTMCIGACPSQFRAANMHAQIKTSLHRLKPDTVPAPCCVPASYNPMVLIQKTDTGVSLQTYDDLLAKDCHCI

SEQ ID NO: 20 - protein, 712 aa, Artificial Sequence
  source: /note="Description of Artificial Sequence: Synthetic polypeptide"
DAHKSEVAHRFKDLGEENFKALVLIAFAQYLQQCPFEDHVKLVNEVTEFAKTCVADESAENCDKSLHTLFGDKLCTVATLRETYGEMADCCAKQEPERNECFLQHKDDNPNLPRLVRPEVDVMCTAFHDNEETFLKKYLYEIARRHPYFYAPELLFFAKRYKAAFTECCQAADKAACLLPKLDELRDEGKASSAKQRLKCASLQKFGERAFKAWAVARLSQRFPKAEFAEVSKLVTDLTKVHTECCHGDLLECADDRADLAKYICENQDSISSKLKECCEKPLLEKSHCIAEVENDEMPADLPSLAADFVESKDVCKNYAEAKDVFLGMFLYEYARRHPDYSVVLLLRLAKTYETTLEKCCAAADPHECYAKVFDEFKPLVEEPQNLIKQNCELFEQLGEYKFQNALLVRYTKKVPQVSTPTLVEVSRNLGKVGSKCCKHPEAKRMPCAEDYLSVVLNQLCVLHEKTPVSDRVTKCCTESLVNRRPCFSALEVDETYVPKEFNAETFTFHADICTLSEKERQIKKQTALVELVKHKPKATKEQLKAVMDDFAAFVEKCCKADDKETCFAEEGKKLVAASQAALGLGGGGSGGGGSGGGGSAHNGDHCPLGPGRCCRLHTVRASLEDLGWADWVLSPREVQVTMCIGACPSQFRAANMHAQIKTSLHRLKPDTVPAPCCVPASYNPMVLIQKTDTGVSLQTYDDLLAKDCHCI

SEQ ID NO: 21 - protein, 712 aa, Artificial Sequence
  source: /note="Description of Artificial Sequence: Synthetic polypeptide"
DAHKSEVAHRFKDLGEENFKALVLIAFAQYLQQCPFEDHVKLVNEVTEFAKTCVADESAENCDKSLHTLFGDKLCTVATLRETYGEMADCCAKQEPERNECFLQHKDDNPNLPRLVRPEVDVMCTAFHDNEETFLKKYLYEIARRHPYFYAPELLFFAKRYKAAFTECCQAADKAACLLPKLDELRDEGKASSAKQRLKCASLQKFGERAFKAWAVARLSQRFPKAEFAEVSKLVTDLTKVHTECCHGDLLECADDRADLAKYICENQDSISSKLKECCEKPLLEKSHCIAEVENDEMPADLPSLAADFVESKDVCKNYAEAKDVFLGMFLYEYARRHPDYSVVLLLRLAKTYETTLEKCCAAADPHECYAKVFDEFKPLVEEPQNLIKQNCELFEQLGEYKFQNALLVRYTKKVPQVSTPTLVEVSRNLGKVGSKCCKHPEAKRMPCAEDYLSVVLNQLCVLHEKTPVSDRVTKCCTESLVNRRPCFSALEVDETYVPKEFNAETFTFHADICTLSEKERQIKKQTALVELVKHKPKATKEQLKAVMDDFAAFVEKCCKADDKETCFAEEGKKLVAASQAALGLGGGGSGGGGSGGGGSAHAGDHCPLGPGRCCRLHTVRASLEDLGWADWVLSPREVQVTMCIGACPSQFRAANMHAQIKTSLHRLKPDTVPAPCCVPASYNPMVLIQKTDTGVSLQTYDDLLAKDCHCI

SEQ ID NO: 22 - protein, 712 aa, Artificial Sequence
  source: /note="Description of Artificial Sequence: Synthetic polypeptide"
DAHKSEVAHRFKDLGEENFKALVLIAFAQYLQQCPFEDHVKLVNEVTEFAKTCVADESAENCDKSLHTLFGDKLCTVATLRETYGEMADCCAKQEPERNECFLQHKDDNPNLPRLVRPEVDVMCTAFHDNEETFLKKYLYEIARRHPYFYAPELLFFAKRYKAAFTECCQAADKAACLLPKLDELRDEGKASSAKQRLKCASLQKFGERAFKAWAVARLSQRFPKAEFAEVSKLVTDLTKVHTECCHGDLLECADDRADLAKYICENQDSISSKLKECCEKPLLEKSHCIAEVENDEMPADLPSLAADFVESKDVCKNYAEAKDVFLGMFLYEYARRHPDYSVVLLLRLAKTYETTLEKCCAAADPHECYAKVFDEFKPLVEEPQNLIKQNCELFEQLGEYKFQNALLVRYTKKVPQVSTPTLVEVSRNLGKVGSKCCKHPEAKRMPCAEDYLSVVLNQLCVLHEKTPVSDRVTKCCTESLVNRRPCFSALEVDETYVPKEFNAETFTFHADICTLSEKERQIKKQTALVELVKHKPKATKEQLKAVMDDFAAFVEKCCKADDKETCFAEEGKKLVAASQAALGLGGGGSGGGGSGGGGSAREGDHCPLGPGRCCRLHTVRASLEDLGWADWVLSPREVQVTMCIGACPSQFRAANMHAQIKTSLHRLKPDTVPAPCCVPASYNPMVLIQKTDTGVSLQTYDDLLAKDCHCI

SEQ ID NO: 23 - protein, 711 aa, Artificial Sequence
  source: /note="Description of Artificial Sequence: Synthetic polypeptide"
EAHKSEIAHRYNALGEQHFKGLVLIAFSQYLQKASYDEHAKLVQEVTDFAKTCVADESAANCDKSLHTLFGDKLCAIPNLRENYGELADCCTKQEPERNECFLQHKDDNPSLPPFERPEAEAMCTSFKENPTTFMGHYLHEVARRHPYFYAPELLYYAEQYNEILTQCCAEADKESCLTPKLDGVKEKALVSSVRQRMKCSSMQKFGERAFKAWAVARLSQTFPNADFAEITKLATDLTKVNKECCHGDLLECADDRAELAKYMCENQATISSKLQTCCDKPLLKKAHCLSEVEHDTMPADLPAIAADFVEDQEVCKNYAEAKDVFLGTFLYEYSRRHPDYSVSLLLRLAKKYEATLEKCCAEANPPACYGTVLAEFQPLVEEPKNLVKTNCDLYEKLGEYGFQNAILVRYTQKAPQVSTPTLVEAARNLGRVGTKCCTLPEDQRLPCVEDYLSAILNRVCLLHEKTPVSEHVTKCCSGSLVERRPCFSALTVDETYVPKEFKAETFTFHSDICTLPEKEKQIKKQTALAELVKHKPKATAEQLKTVMDDFAQFLDTCCKAADKDTCFSTEGPNLVTRAKDALAGGGGSGGGGSGGGGSARNGDHCPLGPGRCCRLHTVRASLEDLGWADWVLSPREVQVTMCIGACPSRFRAANMHAQIKTSLHRLKPDTVPAPCCVPASYNPMVLIQKTDTGVSLQTYDDLLAKDCHCI

SEQ ID NO: 24 - protein, 711 aa, Artificial Sequence
  source: /note="Description of Artificial Sequence: Synthetic polypeptide"
EAHKSEIAHRYNALGEQHFKGLVLIAFSQYLQKASYDEHAKLVQEVTDFAKTCVADESAANCDKSLHTLFGDKLCAIPNLRENYGELADCCTKQEPERNECFLQHKDDNPSLPPFERPEAEAMCTSFKENPTTFMGHYLHEVARRHPYFYAPELLYYAEQYNEILTQCCAEADKESCLTPKLDGVKEKALVSSVRQRMKCSSMQKFGERAFKAWAVARLSQTFPNADFAEITKLATDLTKVNKECCHGDLLECADDRAELAKYMCENQATISSKLQTCCDKPLLKKAHCLSEVEHDTMPADLPAIAADFVEDQEVCKNYAEAKDVFLGTFLYEYSRRHPDYSVSLLLRLAKKYEATLEKCCAEANPPACYGTVLAEFQPLVEEPKNLVKTNCDLYEKLGEYGFQNAILVRYTQKAPQVSTPTLVEAARNLGRVGTKCCTLPEDQRLPCVEDYLSAILNRVCLLHEKTPVSEHVTKCCSGSLVERRPCFSALTVDETYVPKEFKAETFTFHSDICTLPEKEKQIKKQTALAELVKHKPKATAEQLKTVMDDFAQFLDTCCKAADKDTCFSTEGPNLVTRAKDALAGGGGSGGGGSGGGGSARNGDHCPLGPGRCCRLHTVRASLEDLGWADWVLSPREVQVTMCIGACPSQFRAANMHAQIKTSLHRLKPDTVPAPCCVPARYNPMVLIQKTDTGVSLQTYDDLLAKDCHCI

SEQ ID NO: 25 - protein, 711 aa, Artificial Sequence
  source: /note="Description of Artificial Sequence: Synthetic polypeptide"
EAHKSEIAHRYNALGEQHFKGLVLIAFSQYLQKASYDEHAKLVQEVTDFAKTCVADESAANCDKSLHTLFGDKLCAIPNLRENYGELADCCTKQEPERNECFLQHKDDNPSLPPFERPEAEAMCTSFKENPTTFMGHYLHEVARRHPYFYAPELLYYAEQYNEILTQCCAEADKESCLTPKLDGVKEKALVSSVRQRMKCSSMQKFGERAFKAWAVARLSQTFPNADFAEITKLATDLTKVNKECCHGDLLECADDRAELAKYMCENQATISSKLQTCCDKPLLKKAHCLSEVEHDTMPADLPAIAADFVEDQEVCKNYAEAKDVFLGTFLYEYSRRHPDYSVSLLLRLAKKYEATLEKCCAEANPPACYGTVLAEFQPLVEEPKNLVKTNCDLYEKLGEYGFQNAILVRYTQKAPQVSTPTLVEAARNLGRVGTKCCTLPEDQRLPCVEDYLSAILNRVCLLHEKTPVSEHVTKCCSGSLVERRPCFSALTVDETYVPKEFKAETFTFHSDICTLPEKEKQIKKQTALAELVKHKPKATAEQLKTVMDDFAQFLDTCCKAADKDTCFSTEGPNLVTRAKDALAGGGGSGGGGSGGGGSARNGDHCPLGPGRCCRLHTVRASLEDLGWADWVLSPREVQVTMCIGACPSQFRAANMHAQIKTSLHRLKPDTVPAPCCVPASYNPMVLIQKTRTGVSLQTYDDLLAKDCHCI

SEQ ID NO: 26 - protein, 711 aa, Artificial Sequence
  source: /note="Description of Artificial Sequence: Synthetic polypeptide"
EAHKSEIAHRYNALGEQHFKGLVLIAFSQYLQKASYDEHAKLVQEVTDFAKTCVADESAANCDKSLHTLFGDKLCAIPNLRENYGELADCCTKQEPERNECFLQHKDDNPSLPPFERPEAEAMCTSFKENPTTFMGHYLHEVARRHPYFYAPELLYYAEQYNEILTQCCAEADKESCLTPKLDGVKEKALVSSVRQRMKCSSMQKFGERAFKAWAVARLSQTFPNADFAEITKLATDLTKVNKECCHGDLLECADDRAELAKYMCENQATISSKLQTCCDKPLLKKAHCLSEVEHDTMPADLPAIAADFVEDQEVCKNYAEAKDVFLGTFLYEYSRRHPDYSVSLLLRLAKKYEATLEKCCAEANPPACYGTVLAEFQPLVEEPKNLVKTNCDLYEKLGEYGFQNAILVRYTQKAPQVSTPTLVEAARNLGRVGTKCCTLPEDQRLPCVEDYLSAILNRVCLLHEKTPVSEHVTKCCSGSLVERRPCFSALTVDETYVPKEFKAETFTFHSDICTLPEKEKQIKKQTALAELVKHKPKATAEQLKTVMDDFAQFLDTCCKAADKDTCFSTEGPNLVTRAKDALAGGGGSGGGGSGGGGSARNGDHCPLGPGRCCRLHTVRASLEDLGWADWVLSPREVQVTMCIGACPSQFRAANMHAQIKTSLHRLKPDTVPAPCCVPASYNPMVLIQKTDTGVSRQTYDDLLAKDCHCI

SEQ ID NO: 27 - protein, 711 aa, Artificial Sequence
  source: /note="Description of Artificial Sequence: Synthetic polypeptide"
EAHKSEIAHRYNALGEQHFKGLVLIAFSQYLQKASYDEHAKLVQEVTDFAKTCVADESAANCDKSLHTLFGDKLCAIPNLRENYGELADCCTKQEPERNECFLQHKDDNPSLPPFERPEAEAMCTSFKENPTTFMGHYLHEVARRHPYFYAPELLYYAEQYNEILTQCCAEADKESCLTPKLDGVKEKALVSSVRQRMKCSSMQKFGERAFKAWAVARLSQTFPNADFAEITKLATDLTKVNKECCHGDLLECADDRAELAKYMCENQATISSKLQTCCDKPLLKKAHCLSEVEHDTMPADLPAIAADFVEDQEVCKNYAEAKDVFLGTFLYEYSRRHPDYSVSLLLRLAKKYEATLEKCCAEANPPACYGTVLAEFQPLVEEPKNLVKTNCDLYEKLGEYGFQNAILVRYTQKAPQVSTPTLVEAARNLGRVGTKCCTLPEDQRLPCVEDYLSAILNRVCLLHEKTPVSEHVTKCCSGSLVERRPCFSALTVDETYVPKEFKAETFTFHSDICTLPEKEKQIKKQTALAELVKHKPKATAEQLKTVMDDFAQFLDTCCKAADKDTCFSTEGPNLVTRAKDALAGGGGSGGGGSGGGGSARNGDHCPLGPGRCCRLHRVRASLEDLGWADWVLSPREVQVTMCIGACPSQFRAANMHAQIKTSLHRLKPDTVPAPCCVPASYNPMVLIQKTDTGVSLQTYDDLLAKDCHCI

SEQ ID NO: 28 - protein, 711 aa, Artificial Sequence
  source: /note="Description of Artificial Sequence: Synthetic polypeptide"
EAHKSEIAHRYNALGEQHFKGLVLIAFSQYLQKASYDEHAKLVQEVTDFAKTCVADESAANCDKSLHTLFGDKLCAIPNLRENYGELADCCTKQEPERNECFLQHKDDNPSLPPFERPEAEAMCTSFKENPTTFMGHYLHEVARRHPYFYAPELLYYAEQYNEILTQCCAEADKESCLTPKLDGVKEKALVSSVRQRMKCSSMQKFGERAFKAWAVARLSQTFPNADFAEITKLATDLTKVNKECCHGDLLECADDRAELAKYMCENQATISSKLQTCCDKPLLKKAHCLSEVEHDTMPADLPAIAADFVEDQEVCKNYAEAKDVFLGTFLYEYSRRHPDYSVSLLLRLAKKYEATLEKCCAEANPPACYGTVLAEFQPLVEEPKNLVKTNCDLYEKLGEYGFQNAILVRYTQKAPQVSTPTLVEAARNLGRVGTKCCTLPEDQRLPCVEDYLSAILNRVCLLHEKTPVSEHVTKCCSGSLVERRPCFSALTVDETYVPKEFKAETFTFHSDICTLPEKEKQIKKQTALAELVKHKPKATAEQLKTVMDDFAQFLDTCCKAADKDTCFSTEGPNLVTRAKDALAGGGGSGGGGSGGGGSARNGDHCPLGPGRCCRLHTVRASLRDLGWADWVLSPREVQVTMCIGACPSQFRAANMHAQIKTSLHRLKPDTVPAPCCVPASYNPMVLIQKTDTGVSLQTYDDLLAKDCHCI

SEQ ID NO: 29 - protein, 711 aa, Artificial Sequence
  source: /note="Description of Artificial Sequence: Synthetic polypeptide"
EAHKSEIAHRYNALGEQHFKGLVLIAFSQYLQKASYDEHAKLVQEVTDFAKTCVADESAANCDKSLHTLFGDKLCAIPNLRENYGELADCCTKQEPERNECFLQHKDDNPSLPPFERPEAEAMCTSFKENPTTFMGHYLHEVARRHPYFYAPELLYYAEQYNEILTQCCAEADKESCLTPKLDGVKEKALVSSVRQRMKCSSMQKFGERAFKAWAVARLSQTFPNADFAEITKLATDLTKVNKECCHGDLLECADDRAELAKYMCENQATISSKLQTCCDKPLLKKAHCLSEVEHDTMPADLPAIAADFVEDQEVCKNYAEAKDVFLGTFLYEYSRRHPDYSVSLLLRLAKKYEATLEKCCAEANPPACYGTVLAEFQPLVEEPKNLVKTNCDLYEKLGEYGFQNAILVRYTQKAPQVSTPTLVEAARNLGRVGTKCCTLPEDQRLPCVEDYLSAILNRVCLLHEKTPVSEHVTKCCSGSLVERRPCFSALTVDETYVPKEFKAETFTFHSDICTLPEKEKQIKKQTALAELVKHKPKATAEQLKTVMDDFAQFLDTCCKAADKDTCFSTEGPNLVTRAKDALAGGGGSGGGGSGGGGSARNGDHCPLGPGRCCRLHTVRASLEDLGWADRVLSPREVQVTMCIGACPSQFRAANMHAQIKTSLHRLKPDTVPAPCCVPASYNPMVLIQKTDTGVSLQTYDDLLAKDCHCI

SEQ ID NO: 30 - protein, 711 aa, Artificial Sequence
  source: /note="Description of Artificial Sequence: Synthetic polypeptide"
EAHKSEIAHRYNALGEQHFKGLVLIAFSQYLQKASYDEHAKLVQEVTDFAKTCVADESAANCDKSLHTLFGDKLCAIPNLRENYGELADCCTKQEPERNECFLQHKDDNPSLPPFERPEAEAMCTSFKENPTTFMGHYLHEVARRHPYFYAPELLYYAEQYNEILTQCCAEADKESCLTPKLDGVKEKALVSSVRQRMKCSSMQKFGERAFKAWAVARLSQTFPNADFAEITKLATDLTKVNKECCHGDLLECADDRAELAKYMCENQATISSKLQTCCDKPLLKKAHCLSEVEHDTMPADLPAIAADFVEDQEVCKNYAEAKDVFLGTFLYEYSRRHPDYSVSLLLRLAKKYEATLEKCCAEANPPACYGTVLAEFQPLVEEPKNLVKTNCDLYEKLGEYGFQNAILVRYTQKAPQVSTPTLVEAARNLGRVGTKCCTLPEDQRLPCVEDYLSAILNRVCLLHEKTPVSEHVTKCCSGSLVERRPCFSALTVDETYVPKEFKAETFTFHSDICTLPEKEKQIKKQTALAELVKHKPKATAEQLKTVMDDFAQFLDTCCKAADKDTCFSTEGPNLVTRAKDALAGGGGSGGGGSGGGGSARNGDHCPLGPGRCCRLHTVRASLEDLGWADWVLRPREVQVTMCIGACPSQFRAANMHAQIKTSLHRLKPDTVPAPCCVPASYNPMVLIQKTDTGVSLQTYDDLLAKDCHCI

SEQ ID NO: 31 - protein, 711 aa, Artificial Sequence
  source: /note="Description of Artificial Sequence: Synthetic polypeptide"
EAHKSEIAHRYNALGEQHFKGLVLIAFSQYLQKASYDEHAKLVQEVTDFAKTCVADESAANCDKSLHTLFGDKLCAIPNLRENYGELADCCTKQEPERNECFLQHKDDNPSLPPFERPEAEAMCTSFKENPTTFMGHYLHEVARRHPYFYAPELLYYAEQYNEILTQCCAEADKESCLTPKLDGVKEKALVSSVRQRMKCSSMQKFGERAFKAWAVARLSQTFPNADFAEITKLATDLTKVNKECCHGDLLECADDRAELAKYMCENQATISSKLQTCCDKPLLKKAHCLSEVEHDTMPADLPAIAADFVEDQEVCKNYAEAKDVFLGTFLYEYSRRHPDYSVSLLLRLAKKYEATLEKCCAEANPPACYGTVLAEFQPLVEEPKNLVKTNCDLYEKLGEYGFQNAILVRYTQKAPQVSTPTLVEAARNLGRVGTKCCTLPEDQRLPCVEDYLSAILNRVCLLHEKTPVSEHVTKCCSGSLVERRPCFSALTVDETYVPKEFKAETFTFHSDICTLPEKEKQIKKQTALAELVKHKPKATAEQLKTVMDDFAQFLDTCCKAADKDTCFSTEGPNLVTRAKDALAGGGGSGGGGSGGGGSARNGDHCPLGPGRCCRLHTVRASLEDLGWADWVLSPREVRVTMCIGACPSQFRAANMHAQIKTSLHRLKPDTVPAPCCVPASYNPMVLIQKTDTGVSLQTYDDLLAKDCHCI

SEQ ID NO: 32 - protein, 711 aa, Artificial Sequence
  source: /note="Description of Artificial Sequence: Synthetic polypeptide"
EAHKSEIAHRYNALGEQHFKGLVLIAFSQYLQKASYDEHAKLVQEVTDFAKTCVADESAANCDKSLHTLFGDKLCAIPNLRENYGELADCCTKQEPERNECFLQHKDDNPSLPPFERPEAEAMCTSFKENPTTFMGHYLHEVARRHPYFYAPELLYYAEQYNEILTQCCAEADKESCLTPKLDGVKEKALVSSVRQRMKCSSMQKFGERAFKAWAVARLSQTFPNADFAEITKLATDLTKVNKECCHGDLLECADDRAELAKYMCENQATISSKLQTCCDKPLLKKAHCLSEVEHDTMPADLPAIAADFVEDQEVCKNYAEAKDVFLGTFLYEYSRRHPDYSVSLLLRLAKKYEATLEKCCAEANPPACYGTVLAEFQPLVEEPKNLVKTNCDLYEKLGEYGFQNAILVRYTQKAPQVSTPTLVEAARNLGRVGTKCCTLPEDQRLPCVEDYLSAILNRVCLLHEKTPVSEHVTKCCSGSLVERRPCFSALTVDETYVPKEFKAETFTFHSDICTLPEKEKQIKKQTALAELVKHKPKATAEQLKTVMDDFAQFLDTCCKAADKDTCFSTEGPNLVTRAKDALAGGGGSGGGGSGGGGSARNGDHCPLGPGRCCRLHTVRASLEDLGWADWVLSPREVQVTMCIGACPSQFRAANRHAQIKTSLHRLKPDTVPAPCCVPASYNPMVLIQKTDTGVSLQTYDDLLAKDCHCI

SEQ ID NO: 33 - protein, 711 aa, Artificial Sequence
  source: /note="Description of Artificial Sequence: Synthetic polypeptide"
EAHKSEIAHRYNALGEQHFKGLVLIAFSQYLQKASYDEHAKLVQEVTDFAKTCVADESAANCDKSLHTLFGDKLCAIPNLRENYGELADCCTKQEPERNECFLQHKDDNPSLPPFERPEAEAMCTSFKENPTTFMGHYLHEVARRHPYFYAPELLYYAEQYNEILTQCCAEADKESCLTPKLDGVKEKALVSSVRQRMKCSSMQKFGERAFKAWAVARLSQTFPNADFAEITKLATDLTKVNKECCHGDLLECADDRAELAKYMCENQATISSKLQTCCDKPLLKKAHCLSEVEHDTMPADLPAIAADFVEDQEVCKNYAEAKDVFLGTFLYEYSRRHPDYSVSLLLRLAKKYEATLEKCCAEANPPACYGTVLAEFQPLVEEPKNLVKTNCDLYEKLGEYGFQNAILVRYTQKAPQVSTPTLVEAARNLGRVGTKCCTLPEDQRLPCVEDYLSAILNRVCLLHEKTPVSEHVTKCCSGSLVERRPCFSALTVDETYVPKEFKAETFTFHSDICTLPEKEKQIKKQTALAELVKHKPKATAEQLKTVMDDFAQFLDTCCKAADKDTCFSTEGPNLVTRAKDALAGGGGSGGGGSGGGGSARNGDHCPLGPGRCCRLHTVRASLEDLGWADWVLSPREVQVTMCIGACPSQFRAANMHAQIKTSLHRLKPDTVPAPCCVPASYNPMVLRQKTDTGVSLQTYDDLLAKDCHCI

SEQ ID NO: 34 - protein, 711 aa, Artificial Sequence
  source: /note="Description of Artificial Sequence: Synthetic polypeptide"
EAHKSEIAHRYNALGEQHFKGLVLIAFSQYLQKASYDEHAKLVQEVTDFAKTCVADESAANCDKSLHTLFGDKLCAIPNLRENYGELADCCTKQEPERNECFLQHKDDNPSLPPFERPEAEAMCTSFKENPTTFMGHYLHEVARRHPYFYAPELLYYAEQYNEILTQCCAEADKESCLTPKLDGVKEKALVSSVRQRMKCSSMQKFGERAFKAWAVARLSQTFPNADFAEITKLATDLTKVNKECCHGDLLECADDRAELAKYMCENQATISSKLQTCCDKPLLKKAHCLSEVEHDTMPADLPAIAADFVEDQEVCKNYAEAKDVFLGTFLYEYSRRHPDYSVSLLLRLAKKYEATLEKCCAEANPPACYGTVLAEFQPLVEEPKNLVKTNCDLYEKLGEYGFQNAILVRYTQKAPQVSTPTLVEAARNLGRVGTKCCTLPEDQRLPCVEDYLSAILNRVCLLHEKTPVSEHVTKCCSGSLVERRPCFSALTVDETYVPKEFKAETFTFHSDICTLPEKEKQIKKQTALAELVKHKPKATAEQLKTVMDDFAQFLDTCCKAADKDTCFSTEGPNLVTRAKDALAGGGGSGGGGSGGGGSARNGDHCPLGPGRCCRLHTVRASLEDLGWADWVLSPREVQVTMCIGACPSQFRAANMHAQIKTSLHRLKPDTVPAPCCVPASYNPMVLAQKTDTGVSLQTYDDLLAKDCHCI

SEQ ID NO: 35 - protein, 711 aa, Artificial Sequence
  source: /note="Description of Artificial Sequence: Synthetic polypeptide"
EAHKSEIAHRYNALGEQHFKGLVLIAFSQYLQKASYDEHAKLVQEVTDFAKTCVADESAANCDKSLHTLFGDKLCAIPNLRENYGELADCCTKQEPERNECFLQHKDDNPSLPPFERPEAEAMCTSFKENPTTFMGHYLHEVARRHPYFYAPELLYYAEQYNEILTQCCAEADKESCLTPKLDGVKEKALVSSVRQRMKCSSMQKFGERAFKAWAVARLSQTFPNADFAEITKLATDLTKVNKECCHGDLLECADDRAELAKYMCENQATISSKLQTCCDKPLLKKAHCLSEVEHDTMPADLPAIAADFVEDQEVCKNYAEAKDVFLGTFLYEYSRRHPDYSVSLLLRLAKKYEATLEKCCAEANPPACYGTVLAEFQPLVEEPKNLVKTNCDLYEKLGEYGFQNAILVRYTQKAPQVSTPTLVEAARNLGRVGTKCCTLPEDQRLPCVEDYLSAILNRVCLLHEKTPVSEHVTKCCSGSLVERRPCFSALTVDETYVPKEFKAETFTFHSDICTLPEKEKQIKKQTALAELVKHKPKATAEQLKTVMDDFAQFLDTCCKAADKDTCFSTEGPNLVTRAKDALAGGGGSGGGGSGGGGSARNGDHCPLGPGRCCRLHTVRASLEDLGWADWVLSPREVQVTMCIGACPSQFRAANMHAQIKTSLHRLKPDTVPAPCCVPASYNPMVLIRKTDTGVSLQTYDDLLAKDCHCI

SEQ ID NO: 36 - protein, 711 aa, Artificial Sequence
  source: /note="Description of Artificial Sequence: Synthetic polypeptide"
EAHKSEIAHRYNALGEQHFKGLVLIAFSQYLQKASYDEHAKLVQEVTDFAKTCVADESAANCDKSLHTLFGDKLCAIPNLRENYGELADCCTKQEPERNECFLQHKDDNPSLPPFERPEAEAMCTSFKENPTTFMGHYLHEVARRHPYFYAPELLYYAEQYNEILTQCCAEADKESCLTPKLDGVKEKALVSSVRQRMKCSSMQKFGERAFKAWAVARLSQTFPNADFAEITKLATDLTKVNKECCHGDLLECADDRAELAKYMCENQATISSKLQTCCDKPLLKKAHCLSEVEHDTMPADLPAIAADFVEDQEVCKNYAEAKDVFLGTFLYEYSRRHPDYSVSLLLRLAKKYEATLEKCCAEANPPACYGTVLAEFQPLVEEPKNLVKTNCDLYEKLGEYGFQNAILVRYTQKAPQVSTPTLVEAARNLGRVGTKCCTLPEDQRLPCVEDYLSAILNRVCLLHEKTPVSEHVTKCCSGSLVERRPCFSALTVDETYVPKEFKAETFTFHSDICTLPEKEKQIKKQTALAELVKHKPKATAEQLKTVMDDFAQFLDTCCKAADKDTCFSTEGPNLVTRAKDALAGGGGSGGGGSGGGGSARNGDHCPLGPGRCCRLHTVRASLEDLGWADWVLSPREVQVTMCIGACPSQFRAANMHAQIKTSLHRLKPDTVPAPCCVPASYNPMVLIQKTDTGRSLQTYDDLLAKDCHCI

SEQ ID NO: 37 - protein, 711 aa, Artificial Sequence
  source: /note="Description of Artificial Sequence: Synthetic polypeptide"
EAHKSEIAHRYNALGEQHFKGLVLIAFSQYLQKASYDEHAKLVQEVTDFAKTCVADESAANCDKSLHTLFGDKLCAIPNLRENYGELADCCTKQEPERNECFLQHKDDNPSLPPFERPEAEAMCTSFKENPTTFMGHYLHEVARRHPYFYAPELLYYAEQYNEILTQCCAEADKESCLTPKLDGVKEKALVSSVRQRMKCSSMQKFGERAFKAWAVARLSQTFPNADFAEITKLATDLTKVNKECCHGDLLECADDRAELAKYMCENQATISSKLQTCCDKPLLKKAHCLSEVEHDTMPADLPAIAADFVEDQEVCKNYAEAKDVFLGTFLYEYSRRHPDYSVSLLLRLAKKYEATLEKCCAEANPPACYGTVLAEFQPLVEEPKNLVKTNCDLYEKLGEYGFQNAILVRYTQKAPQVSTPTLVEAARNLGRVGTKCCTLPEDQRLPCVEDYLSAILNRVCLLHEKTPVSEHVTKCCSGSLVERRPCFSALTVDETYVPKEFKAETFTFHSDICTLPEKEKQIKKQTALAELVKHKPKATAEQLKTVMDDFAQFLDTCCKAADKDTCFSTEGPNLVTRAKDALAGGGGSGGGGSGGGGSARNGDHCPLGPGRCCRLHTVRASLEDLGWADWVLSPREVQVTMCIGACPSQFRAANMHAQIKTSLHRLKPDTVPAPCCVPASYNPMVLIQKTDTGVSAQTYDDLLAKDCHCI

SEQ ID NO: 38 - protein, 711 aa, Artificial Sequence
  source: /note="Description of Artificial Sequence: Synthetic polypeptide"
EAHKSEIAHRYNALGEQHFKGLVLIAFSQYLQKASYDEHAKLVQEVTDFAKTCVADESAANCDKSLHTLFGDKLCAIPNLRENYGELADCCTKQEPERNECFLQHKDDNPSLPPFERPEAEAMCTSFKENPTTFMGHYLHEVARRHPYFYAPELLYYAEQYNEILTQCCAEADKESCLTPKLDGVKEKALVSSVRQRMKCSSMQKFGERAFKAWAVARLSQTFPNADFAEITKLATDLTKVNKECCHGDLLECADDRAELAKYMCENQATISSKLQTCCDKPLLKKAHCLSEVEHDTMPADLPAIAADFVEDQEVCKNYAEAKDVFLGTFLYEYSRRHPDYSVSLLLRLAKKYEATLEKCCAEANPPACYGTVLAEFQPLVEEPKNLVKTNCDLYEKLGEYGFQNAILVRYTQKAPQVSTPTLVEAARNLGRVGTKCCTLPEDQRLPCVEDYLSAILNRVCLLHEKTPVSEHVTKCCSGSLVERRPCFSALTVDETYVPKEFKAETFTFHSDICTLPEKEKQIKKQTALAELVKHKPKATAEQLKTVMDDFAQFLDTCCKAADKDTCFSTEGPNLVTRAKDALAGGGGSGGGGSGGGGSARNGDHCPLGPGRCCRLHTVRASLEDLGWADWVLSPREVQVTMCIGACPSQFRAANMHAQIKTSLHRLKPDTVPAPCCVPASYNPMVLAQKTDTGVSAQTYDDLLAKDCHCI

SEQ ID NO: 39 - protein, 711 aa, Artificial Sequence
  source: /note="Description of Artificial Sequence: Synthetic polypeptide"
EAHKSEIAHRYNALGEQHFKGLVLIAFSQYLQKASYDEHAKLVQEVTDFAKTCVADESAANCDKSLHTLFGDKLCAIPNLRENYGELADCCTKQEPERNECFLQHKDDNPSLPPFERPEAEAMCTSFKENPTTFMGHYLHEVARRHPYFYAPELLYYAEQYNEILTQCCAEADKESCLTPKLDGVKEKALVSSVRQRMKCSSMQKFGERAFKAWAVARLSQTFPNADFAEITKLATDLTKVNKECCHGDLLECADDRAELAKYMCENQATISSKLQTCCDKPLLKKAHCLSEVEHDTMPADLPAIAADFVEDQEVCKNYAEAKDVFLGTFLYEYSRRHPDYSVSLLLRLAKKYEATLEKCCAEANPPACYGTVLAEFQPLVEEPKNLVKTNCDLYEKLGEYGFQNAILVRYTQKAPQVSTPTLVEAARNLGRVGTKCCTLPEDQRLPCVEDYLSAILNRVCLLHEKTPVSEHVTKCCSGSLVERRPCFSALTVDETYVPKEFKAETFTFHSDICTLPEKEKQIKKQTALAELVKHKPKATAEQLKTVMDDFAQFLDTCCKAADKDTCFSTEGPNLVTRAKDALAGGGGSGGGGSGGGGSARNGDHCPLGPGRCCRLHTVRASLEDLGWADWVLSPREVQVTMCIGACPSQFRAANMHAQIKTSLHRLKPDTVPAPCCVPASYNPMVLIQKTDTGVSLRTYDDLLAKDCHCI

SEQ ID NO: 40 - protein, 711 aa, Artificial Sequence
  source: /note="Description of Artificial Sequence: Synthetic polypeptide"
EAHKSEIAHRYNALGEQHFKGLVLIAFSQYLQKASYDEHAKLVQEVTDFAKTCVADESAANCDKSLHTLFGDKLCAIPNLRENYGELADCCTKQEPERNECFLQHKDDNPSLPPFERPEAEAMCTSFKENPTTFMGHYLHEVARRHPYFYAPELLYYAEQYNEILTQCCAEADKESCLTPKLDGVKEKALVSSVRQRMKCSSMQKFGERAFKAWAVARLSQTFPNADFAEITKLATDLTKVNKECCHGDLLECADDRAELAKYMCENQATISSKLQTCCDKPLLKKAHCLSEVEHDTMPADLPAIAADFVEDQEVCKNYAEAKDVFLGTFLYEYSRRHPDYSVSLLLRLAKKYEATLEKCCAEANPPACYGTVLAEFQPLVEEPKNLVKTNCDLYEKLGEYGFQNAILVRYTQKAPQVSTPTLVEAARNLGRVGTKCCTLPEDQRLPCVEDYLSAILNRVCLLHEKTPVSEHVTKCCSGSLVERRPCFSALTVDETYVPKEFKAETFTFHSDICTLPEKEKQIKKQTALAELVKHKPKATAEQLKTVMDDFAQFLDTCCKAADKDTCFSTEGPNLVTRAKDALAGGGGSGGGGSGGGGSARNGDHCPLGPGRCCRLHTVRASLEDLGWADWVLSPREVQVTMCIGACPSQFRAANMHAQIKTSLHRLKPDTVPAPCCVPASYNPMVLIQKTDTGVSLQRYDDLLAKDCHCI

SEQ ID NO: 41 - protein, 112 aa, Artificial Sequence
  source: /note="Description of Artificial Sequence: Synthetic polypeptide"
AHAGDHCPLGPGRCCRLHTVRASLEDLGWADWVLSPREVQVTMCIGACPSQFRAANMHAQIKTSLHRLKPDTVPAPCCVPASYNPMVLIQKTDTGVSLQTYDDLLAKDCHCI

SEQ ID NO: 42 - protein, 112 aa, Artificial Sequence
  source: /note="Description of Artificial Sequence: Synthetic polypeptide"
ARNGDHCPLGPGRCCRLHTVRASLEDLGWADWVLSPREVQVTMCIGACPSQFRAANMHAQIKTSLHRLQPDTVPAPCCVPASYNPMVLIQRTDTGVSLQTYDDLLARDCHCI

SEQ ID NO: 43 - protein, 112 aa, Artificial Sequence
  source: /note="Description of Artificial Sequence: Synthetic polypeptide"
ARNGDHCPLGPGRCCRLHTVRASLEDLGWADWVLSPREVQVTMCIGACPSQFRAANMHAQIQTSLHRLKPDTVPAPCCVPASYNPMVLIQRTDTGVSLQTYDDLLARDCHCI

SEQ ID NO: 44 - protein, 112 aa, Artificial Sequence
  source: /note="Description of Artificial Sequence: Synthetic polypeptide"
ARNGDHCPLGPGRCCRLHTVRASLEDLGWADWVLSPREVQVTMCIGACPSQFRAANMHAQIQTSLHRLQPDTVPAPCCVPASYNPMVLIQKTDTGVSLQTYDDLLARDCHCI

SEQ ID NO: 45 - protein, 112 aa, Artificial Sequence
  source: /note="Description of Artificial Sequence: Synthetic polypeptide"
ARNGDHCPLGPGRCCRLHTVRASLEDLGWADWVLSPREVQVTMCIGACPSQFRAANMHAQIQTSLHRLQPDTVPAPCCVPASYNPMVLIQRTDTGVSLQTYDDLLAKDCHCI

SEQ ID NO: 46 - protein, 112 aa, Artificial Sequence
  source: /note="Description of Artificial Sequence: Synthetic polypeptide"
ARNGDHCPLGPGRCCRLHTVRASLEDLGWADWVLSPREVQVTMCIGACPSQFRAANMHAQIKTSLHRLKPDTVPAPCCVPASYNPMVLIQRTDTGVSLQTYDDLLARDCHCI

SEQ ID NO: 47 - protein, 112 aa, Artificial Sequence
  source: /note="Description of Artificial Sequence: Synthetic polypeptide"
ARNGDHCPLGPGRCCRLHTVRASLEDLGWADWVLSPREVQVTMCIGACPSQFRAANMHAQIKTSLHRLQPDTVPAPCCVPASYNPMVLIQKTDTGVSLQTYDDLLARDCHCI

SEQ ID NO: 48 - protein, 112 aa, Artificial Sequence
  source: /note="Description of Artificial Sequence: Synthetic polypeptide"
ARNGDHCPLGPGRCCRLHTVRASLEDLGWADWVLSPREVQVTMCIGACPSQFRAANMHAQIKTSLHRLQPDTVPAPCCVPASYNPMVLIQRTDTGVSLQTYDDLLAKDCHCI

SEQ ID NO: 49 - protein, 112 aa, Artificial Sequence
  source: /note="Description of Artificial Sequence: Synthetic polypeptide"
ARNGDHCPLGPGRCCRLQSLRASLEDLGWADWVLSPREVQVTMCIGACPSQFRAANMHAQIQTSLHRLQPDTVPAPCCVPASYNPMVLIQRTDTGVSLQTYDDLLARDCHCI

SEQ ID NO: 50 - protein, 112 aa, Artificial Sequence
  source: /note="Description of Artificial Sequence: Synthetic polypeptide"
ARNGDHCPLGPGRCCRLQSLRASLEDLGWADWVLSPREVQVTMCIGACPSQFRAANMHAQIQTSLHRLKPDTVPAPCCVPASYNPMVLIQRTDTGVSLQTYDDLLARDCHCI

SEQ ID NO: 51 - protein, 112 aa, Artificial Sequence
  source: /note="Description of Artificial Sequence: Synthetic polypeptide"
ARNGDHCPLGPGRCCRLQSLRASLEDLGWADWVLSPREVQVTMCIGACPSQFRAANMHAQIQTSLHRLQPDTVPAPCCVPASYNPMVLIQKTDTGVSLQTYDDLLARDCHCI

SEQ ID NO: 52 - protein, 112 aa, Artificial Sequence
  source: /note="Description of Artificial Sequence: Synthetic polypeptide"
ARNGDHCPLGPGRCCRLQSLRASLEDLGWADWVLSPREVQVTMCIGACPSQFRAANMHAQIQTSLHRLQPDTVPAPCCVPASYNPMVLIQRTDTGVSLQTYDDLLAKDCHCI

SEQ ID NO: 53 - protein, 113 aa, Artificial Sequence
  source: /note="Description of Artificial Sequence: Synthetic polypeptide"
PARNGDHCPLGPGRCCRLHTVRASLEDLGWADWVLSPREVQVTMCIGACPSQFRAANMHAQIKTSLHRLKPDTVPAPCCVPASYNPMVLIQKTDTGVSLQTYDDLLAKDCHCI

SEQ ID NO: 54 - protein, 113 aa, Artificial Sequence
  source: /note="Description of Artificial Sequence: Synthetic polypeptide"
PARNGDHCPLGPGRCCRLHTVRASLEDLGWADWVLSPREVQVTMCIGACPSQFRAANMHAQIKTSLHRLQPDTVPAPCCVPASYNPMVLIQRTDTGVSLQTYDDLLARDCHCI

SEQ ID NO: 55 - protein, 113 aa, Artificial Sequence
  source: /note="Description of Artificial Sequence: Synthetic polypeptide"
PARNGDHCPLGPGRCCRLHTVRASLEDLGWADWVLSPREVQVTMCIGACPSQFRAANMHAQIQTSLHRLKPDTVPAPCCVPASYNPMVLIQRTDTGVSLQTYDDLLARDCHCI

SEQ ID NO: 56 - protein, 113 aa, Artificial Sequence
  source: /note="Description of Artificial Sequence: Synthetic polypeptide"
PARNGDHCPLGPGRCCRLHTVRASLEDLGWADWVLSPREVQVTMCIGACPSQFRAANMHAQIQTSLHRLQPDTVPAPCCVPASYNPMVLIQKTDTGVSLQTYDDLLARDCHCI

SEQ ID NO: 57 - protein, 113 aa, Artificial Sequence
  source: /note="Description of Artificial Sequence: Synthetic polypeptide"
PARNGDHCPLGPGRCCRLHTVRASLEDLGWADWVLSPREVQVTMCIGACPSQFRAANMHAQIQTSLHRLQPDTVPAPCCVPASYNPMVLIQRTDTGVSLQTYDDLLAKDCHCI

SEQ ID NO: 58 - protein, 113 aa, Artificial Sequence
  source: /note="Description of Artificial Sequence: Synthetic polypeptide"
PARNGDHCPLGPGRCCRLHTVRASLEDLGWADWVLSPREVQVTMCIGACPSQFRAANMHAQIKTSLHRLKPDTVPAPCCVPASYNPMVLIQRTDTGVSLQTYDDLLARDCHCI

SEQ ID NO: 59 - protein, 113 aa, Artificial Sequence
  source: /note="Description of Artificial Sequence: Synthetic polypeptide"
PARNGDHCPLGPGRCCRLHTVRASLEDLGWADWVLSPREVQVTMCIGACPSQFRAANMHAQIKTSLHRLQPDTVPAPCCVPASYNPMVLIQKTDTGVSLQTYDDLLARDCHCI

SEQ ID NO: 60 - protein, 113 aa, Artificial Sequence
  source: /note="Description of Artificial Sequence: Synthetic polypeptide"
PARNGDHCPLGPGRCCRLHTVRASLEDLGWADWVLSPREVQVTMCIGACPSQFRAANMHAQIKTSLHRLQPDTVPAPCCVPASYNPMVLIQRTDTGVSLQTYDDLLAKDCHCI

SEQ ID NO: 61 - protein, 113 aa, Artificial Sequence
  source: /note="Description of Artificial Sequence: Synthetic polypeptide"
PARNGDHCPLGPGRCCRLQSLRASLEDLGWADWVLSPREVQVTMCIGACPSQFRAANMHAQIQTSLHRLQPDTVPAPCCVPASYNPMVLIQRTDTGVSLQTYDDLLARDCHCI

SEQ ID NO: 62 - protein, 113 aa, Artificial Sequence
  source: /note="Description of Artificial Sequence: Synthetic polypeptide"
PARNGDHCPLGPGRCCRLQSLRASLEDLGWADWVLSPREVQVTMCIGACPSQFRAANMHAQIQTSLHRLKPDTVPAPCCVPASYNPMVLIQRTDTGVSLQTYDDLLARDCHCI

SEQ ID NO: 63 - protein, 113 aa, Artificial Sequence
  source: /note="Description of Artificial Sequence: Synthetic polypeptide"
PARNGDHCPLGPGRCCRLQSLRASLEDLGWADWVLSPREVQVTMCIGACPSQFRAANMHAQIQTSLHRLQPDTVPAPCCVPASYNPMVLIQKTDTGVSLQTYDDLLARDCHCI

SEQ ID NO: 64 - protein, 113 aa, Artificial Sequence
  source: /note="Description of Artificial Sequence: Synthetic polypeptide"
PARNGDHCPLGPGRCCRLQSLRASLEDLGWADWVLSPREVQVTMCIGACPSQFRAANMHAQIQTSLHRLQPDTVPAPCCVPASYNPMVLIQRTDTGVSLQTYDDLLAKDCHCI

SEQ ID NO: 65 - protein, 733 aa, Artificial Sequence
  source: /note="Description of Artificial Sequence: Synthetic polypeptide"
MDMRVPAQLLGLLLLWLRGARCDAHKSEVAHRFKDLGEENFKALVLIAFAQYLQQCPFEDHVKLVNEVTEFAKTCVADESAENCDKSLHTLFGDKLCTVATLRETYGEMADCCAKQEPERNECFLQHKDDNPNLPRLVRPEVDVMCTAFHDNEETFLKKYLYEIARRHPYFYAPELLFFAKRYKAAFTECCQAADKAACLLPKLDELRDEGKASSAKQRLKCASLQKFGERAFKAWAVARLSQRFPKAEFAEVSKLVTDLTKVHTECCHGDLLECADDRADLAKYICENQDSISSKLKECCEKPLLEKSHCIAEVENDEMPADLPSLAADFVESKDVCKNYAEAKDVFLGMFLYEYARRHPDYSVVLLLRLAKTYETTLEKCCAAADPHECYAKVFDEFKPLVEEPQNLIKQNCELFEQLGEYKFQNALLVRYTKKVPQVSTPTLVEVSRNLGKVGSKCCKHPEAKRMPCAEDYLSVVLNQLCVLHEKTPVSDRVTKCCTESLVNRRPCFSALEVDETYVPKEFNAETFTFHADICTLSEKERQIKKQTALVELVKHKPKATKEQLKAVMDDFAAFVEKCCKADDKETCFAEEGKKLVAASQAALGLGGGGSGGGGSIEGRARNGDHCPLGPGRCCRLHTVRASLEDLGWADWVLSPREVQVTMCIGACPSQFRAANMHAQIKTSLHRLKPDTVPAPCCVPASYNPMVLIQKTDTGVSLQTYDDLLAKDCHCI

SEQ ID NO: 66 - protein, 711 aa, Artificial Sequence
  source: /note="Description of Artificial Sequence: Synthetic polypeptide"
DAHKSEVAHRFKDLGEENFKALVLIAFAQYLQQCPFEDHVKLVNEVTEFAKTCVADESAENCDKSLHTLFGDKLCTVATLRETYGEMADCCAKQEPERNECFLQHKDDNPNLPRLVRPEVDVMCTAFHDNEETFLKKYLYEIARRHPYFYAPELLFFAKRYKAAFTECCQAADKAACLLPKLDELRDEGKASSAKQRLKCASLQKFGERAFKAWAVARLSQRFPKAEFAEVSKLVTDLTKVHTECCHGDLLECADDRADLAKYICENQDSISSKLKECCEKPLLEKSHCIAEVENDEMPADLPSLAADFVESKDVCKNYAEAKDVFLGMFLYEYARRHPDYSVVLLLRLAKTYETTLEKCCAAADPHECYAKVFDEFKPLVEEPQNLIKQNCELFEQLGEYKFQNALLVRYTKKVPQVSTPTLVEVSRNLGKVGSKCCKHPEAKRMPCAEDYLSVVLNQLCVLHEKTPVSDRVTKCCTESLVNRRPCFSALEVDETYVPKEFNAETFTFHADICTLSEKERQIKKQTALVELVKHKPKATKEQLKAVMDDFAAFVEKCCKADDKETCFAEEGKKLVAASQAALGLGGGGSGGGGSIEGRARNGDHCPLGPGRCCRLHTVRASLEDLGWADWVLSPREVQVTMCIGACPSQFRAANMHAQIKTSLHRLKPDTVPAPCCVPASYNPMVLIQKTDTGVSLQTYDDLLAKDCHCI

SEQ ID NO: 67 - protein, 734 aa, Artificial Sequence
  source: /note="Description of Artificial Sequence: Synthetic polypeptide"
MDMRVPAQLLGLLLLWLRGARCDAHKSEVAHRFKDLGEENFKALVLIAFAQYLQQCPFEDHVKLVNEVTEFAKTCVADESAENCDKSLHTLFGDKLCTVATLRETYGEMADCCAKQEPERNECFLQHKDDNPNLPRLVRPEVDVMCTAFHDNEETFLKKYLYEIARRHPYFYAPELLFFAKRYKAAFTECCQAADKAACLLPKLDELRDEGKASSAKQRLKCASLQKFGERAFKAWAVARLSQRFPKAEFAEVSKLVTDLTKVHTECCHGDLLECADDRADLAKYICENQDSISSKLKECCEKPLLEKSHCIAEVENDEMPADLPSLAADFVESKDVCKNYAEAKDVFLGMFLYEYARRHPDYSVVLLLRLAKTYETTLEKCCAAADPHECYAKVFDEFKPLVEEPQNLIKQNCELFEQLGEYKFQNALLVRYTKKVPQVSTPTLVEVSRNLGKVGSKCCKHPEAKRMPCAEDYLSVVLNQLCVLHEKTPVSDRVTKCCTESLVNRRPCFSALEVDETYVPKEFNAETFTFHADICTLSEKERQIKKQTALVELVKHKPKATKEQLKAVMDDFAAFVEKCCKADDKETCFAEEGKKLVAASQAALGLGGGGSGGGGSGGGGSARNGDHCPLGPGRCCRLHTVRASLEDLGWADWVLSPREVQVTMCIGACPSQFRAANMHAQIKTSLHRLKPDTVPAPCCVPASYNPMVLIQKTDTGVSLQTYDDLLAKDCHCI

SEQ ID NO: 68 - protein, 712 aa, Artificial Sequence; identical to SEQ ID NO: 14
  source: /note="Description of Artificial Sequence: Synthetic polypeptide"

SEQ ID NO: 69 - protein, 112 aa, Artificial Sequence
  source: /note="Description of Artificial Sequence: Synthetic polypeptide"
ARNGDHCPLGPGRCCRLHTVRASLEDLGAADWVLSPREVQVTMCIGACPSQFRAANMHAQIKTSLHRLKPDTVPAPCCVPASYNPMVLIQKTDTGVSLQTYDDLLAKDCHCI

SEQ ID NO: 70 - protein, 112 aa, Artificial Sequence
  source: /note="Description of Artificial Sequence: Synthetic polypeptide"
ARNGDHCPLGPGRCCRLHTVRASLEDLGWADAVLSPREVQVTMCIGACPSQFRAANMHAQIKTSLHRLKPDTVPAPCCVPASYNPMVLIQKTDTGVSLQTYDDLLAKDCHCI

SEQ ID NO: 71 - protein, 112 aa, Artificial Sequence
  source: /note="Description of Artificial Sequence: Synthetic polypeptide"
ARNGDHCPLGPGRCCRLHTVRASLEDLGWADWVLSPREVQVTMCIGACPSQARAANMHAQIKTSLHRLKPDTVPAPCCVPASYNPMVLIQKTDTGVSLQTYDDLLAKDCHCI

SEQ ID NO: 72 - protein, 112 aa, Artificial Sequence
  source: /note="Description of Artificial Sequence: Synthetic polypeptide"
ARNGDHCPLGPGRCCRLHTVRASLEDLGWADWVLSPREVQVTMCIGACPSQFRAANMHAQIKTSAHRLKPDTVPAPCCVPASYNPMVLIQKTDTGVSLQTYDDLLAKDCHCI

SEQ ID NO: 73 - protein, 112 aa, Artificial Sequence
  source: /note="Description of Artificial Sequence: Synthetic polypeptide"
ARNGDHCPLGPGRCCRLHTVRASLEDLGWADWVLSPREVQVTMCIGACPSQFRAANMHAQIKTSLHRAKPDTVPAPCCVPASYNPMVLIQKTDTGVSLQTYDDLLAKDCHCI

SEQ ID NO: 74 - protein, 112 aa, Artificial Sequence
  source: /note="Description of Artificial Sequence: Synthetic polypeptide"
ARNGDHCPLGPGRCCRLHTVRASLEDLGWADWVLSPREVQVTMCIGACPSQFRAANMHAQIKTSLHRLKPDTVPAPCCVPASYNPMVLAQKTDTGVSLQTYDDLLAKDCHCI

SEQ ID NO: 75 - protein, 112 aa, Artificial Sequence
  source: /note="Description of Artificial Sequence: Synthetic polypeptide"
ARNGDHCPLGPGRCCRLHTVRASLAALGWAAWVLSPREVQVTMCIGACPSQFRAANMHAQIKTSLHRLKPDTVPAPCCVPASYNPMVLIQKTDTGVSLQTYDDLLAKDCHCI

SEQ ID NO: 76 - protein, 112 aa, Artificial Sequence
  source: /note="Description of Artificial Sequence: Synthetic polypeptide"
ARNGDHCPLGPGRCCRLHTVRASLAALGWAAWVLSPRAVQVTMCIGACPSQFRAANMHAQIKTSLHRLKPDTVPAPCCVPASYNPMVLIQKTDTGVSLQTYDDLLAKDCHCI

SEQ ID NO: 77 - protein, 112 aa, Artificial Sequence
  source: /note="Description of Artificial Sequence: Synthetic polypeptide"
ARNGDHCPLGPGRCCRLHTVRASLEDLGWADWVLSPREVQVTMCIGACPSQFRAANMHAQIKTSLHRLKPDTVPAPCCVPASYNPMVLIQKTDTGVSLQTYAALLAKACHCI

SEQ ID NO: 78 - protein, 112 aa, Artificial Sequence
  source: /note="Description of Artificial Sequence: Synthetic polypeptide"
ARNGDHCPLGPGRCCRLHTVRASLEDLGWADWVLSPREVQVTMCIGACPSQFRAANMHAQIKTSLHRLKPDTVPAPCCVPASYNPMVLIQKTATGVSLQTYAALLAKACHCI

SEQ ID NO: 79 - protein, 112 aa, Artificial Sequence
  source: /note="Description of Artificial Sequence: Synthetic polypeptide"
ARNGDHCPLGPGRCCRLHTVRASLEDLGWADWVLSPREVQVTMCIGACPSQFRAANMHAQIKTSLHRLKPDTVPAPCCVPASYNPMVLIQKTATGVSLQTYDDLLAKDCHCI

SEQ ID NO: 80 - protein, 112 aa, Artificial Sequence
  source: /note="Description of Artificial Sequence: Synthetic polypeptide"
ARNGTHCPLGPGRCCRLHTVRASLEDLGWADWVLSPREVQVTMCIGACPSQFRAANMHAQIKTSLHRLKPDTVPAPCCVPASYNPMVLIQKTDTGVSLQTYDDLLAKDCHCI

SEQ ID NO: 81 - protein, 112 aa, Artificial Sequence
  source: /note="Description of Artificial Sequence: Synthetic polypeptide"
ARNGDHCPLGPGRCCRNHTVRASLEDLGWADWVLSPREVQVTMCIGACPSQFRAANMHAQIKTSLHRLKPDTVPAPCCVPASYNPMVLIQKTDTGVSLQTYDDLLAKDCHCI

SEQ ID NO: 82 - protein, 112 aa, Artificial Sequence
  source: /note="Description of Artificial Sequence: Synthetic polypeptide"
ARNGDHCPLGPGRCCRLHTVNASLEDLGWADWVLSPREVQVTMCIGACPSQFRAANMHAQIKTSLHRLKPDTVPAPCCVPASYNPMVLIQKTDTGVSLQTYDDLLAKDCHCI

SEQ ID NO: 83 - protein, 112 aa, Artificial Sequence
  source: /note="Description of Artificial Sequence: Synthetic polypeptide"
ARNGDHCPLGPGRCCRLHTVRASLEDLGWADWNLSPREVQVTMCIGACPSQFRAANMHAQIKTSLHRLKPDTVPAPCCVPASYNPMVLIQKTDTGVSLQTYDDLLAKDCHCI

SEQ ID NO: 84 - protein, 112 aa, Artificial Sequence
  source: /note="Description of Artificial Sequence: Synthetic polypeptide"
ARNGDHCPLGPGRCCRLHTVRASLEDLGWADWVLSPREVNVTMCIGACPSQFRAANMHAQIKTSLHRLKPDTVPAPCCVPASYNPMVLIQKTDTGVSLQTYDDLLAKDCHCI

SEQ ID NO: 85 - protein, 112 aa, Artificial Sequence
  source: /note="Description of Artificial Sequence: Synthetic polypeptide"
ARNGDHCPLGPGRCCRLHTVRASLEDLGWADWVLSPREVQVTMCIGACPSQFRAANMTAQIKTSLHRLKPDTVPAPCCVPASYNPMVLIQKTDTGVSLQTYDDLLAKDCHCI

SEQ ID NO: 86 - protein, 112 aa, Artificial Sequence
  source: /note="Description of Artificial Sequence: Synthetic polypeptide"
ARNGDHCPLGPGRCCRLHTVRASLEDLGWADWVLSPREVQVTMCIGACPSQFRAANMHAQNKTSLHRLKPDTVPAPCCVPASYNPMVLIQKTDTGVSLQTYDDLLAKDCHCI

SEQ ID NO: 87 - protein, 112 aa, Artificial Sequence
  source: /note="Description of Artificial Sequence: Synthetic polypeptide"
ARNGDHCPLGPGRCCRLHTVRASLEDLGWADWVLSPREVQVTMCIGACPSQFRAANMHAQINTSLHRLKPDTVPAPCCVPASYNPMVLIQKTDTGVSLQTYDDLLAKDCHCI

SEQ ID NO: 88 - protein, 112 aa, Artificial Sequence
  source: /note="Description of Artificial Sequence: Synthetic polypeptide"
ARNGDHCPLGPGRCCRLHTVRASLEDLGWADWVLSPREVQVTMCIGACPSQFRAANMHAQIKTSLHRLKNDTVPAPCCVPASYNPMVLIQKTDTGVSLQTYDDLLAKDCHCI

SEQ ID NO: 89 - protein, 112 aa, Artificial Sequence
  source: /note="Description of Artificial Sequence: Synthetic polypeptide"
ARNGDHCPLGPGRCCRLHTVRASLEDLGWADWVLSPREVQVTMCIGACPSQFRAANMHAQIKTSLHRLKPDTVPAPCCVNASYNPMVLIQKTDTGVSLQTYDDLLAKDCHCI

SEQ ID NO: 90 - protein, 112 aa, Artificial Sequence
  source: /note="Description of Artificial Sequence: Synthetic polypeptide"
ARNGDHCPLGPGRCCRLHTVRASLEDLGWADWVLSPREVQVTMCIGACPSQFRAANMHAQIKTSLHRLKPDTVPAPCCVPASYNPMVLINKTDTGVSLQTYDDLLAKDCHCI

SEQ ID NO: 91 - protein, 112 aa, Artificial Sequence
  source: /note="Description of Artificial Sequence: Synthetic polypeptide"
ARNGDHCPLGPGRCCRLHTVRASLEDLGWADWVLSPREVQVTMCIGACPSQFRAANMHAQIKTSLHRLKPDTVPAPCCVPASYNPMVLIQKNDTGVSLQTYDDLLAKDCHCI

SEQ ID NO: 92 - protein, 112 aa, Artificial Sequence
  source: /note="Description of Artificial Sequence: Synthetic polypeptide"
ARNGDHCPLGPGRCCRLHTVRASLEDLGWADWVLSPREVQVTMCIGACPSQFRAANMHAQIKTSLHRLKPDTVPAPCCVPASYNPMVLIQKTDTNVSLQTYDDLLAKDCHCI

SEQ ID NO: 93 - protein, 112 aa, Artificial Sequence
  source: /note="Description of Artificial Sequence: Synthetic polypeptide"
ARNGDHCPLGPGRCCRLHTVRASLEDLGWADWVLSPREVQVTMCIGACPSQFRAANMHAQIKTSLHRLKPDTVPAPCCVPASYNPMVLIQKTDTGVSNQTYDDLLAKDCHCI

SEQ ID NO: 94 - protein, 112 aa, Artificial Sequence
  source: /note="Description of Artificial Sequence: Synthetic polypeptide"
ARNGTHCPLGPGRCCRLHTVRASLEDLGWADWVLSPREVQVTMCIGACPSQFRAANMHAQIKTSLHRLKPDTVPAPCCVPASYNPMVLINKTDTGVSLQTYDDLLAKDCHCI

SEQ ID NO: 95 - protein, 112 aa, Artificial Sequence
  source: /note="Description of Artificial Sequence: Synthetic polypeptide"
ARNGTHCPLGPGRCCRLHTVRASLEDLGWADWVLSPREVQVTMCIGACPSQFRAANMHAQIKTSLHRLKPDTVPAPCCVPASYNPMVLIQKTDTNVSLQTYDDLLAKDCHCI

SEQ ID NO: 96 - protein, 112 aa, Artificial Sequence
  source: /note="Description of Artificial Sequence: Synthetic polypeptide"
ARNGDHCPLGPGRCCRLHTVRASLEDLGWADWVLSPREVNVTMCIGACPSQFRAANMHAQIKTSLHRLKPDTVPAPCCVPASYNPMVLINKTDTGVSLQTYDDLLAKDCHCI

SEQ ID NO: 97 - protein, 112 aa, Artificial Sequence
  source: /note="Description of Artificial Sequence: Synthetic polypeptide"
ARNGDHCPLGPGRCCRLHTVRASLEDLGWADWVLSPREVNVTMCIGACPSQFRAANMHAQIKTSLHRLKPDTVPAPCCVPASYNPMVLIQKTDTNVSLQTYDDLLAKDCHCI

SEQ ID NO: 98 - protein, 112 aa, Artificial Sequence
  source: /note="Description of Artificial Sequence: Synthetic polypeptide"
ARNGDHCPLGPGRCCRLHTVRASLEDLGWADWVLSPREVQVTMCIGACPSQFRAANMHAQIKTSLHRLKNDTVPAPCCVPASYNPMVLINKTDTGVSLQTYDDLLAKDCHCI

SEQ ID NO: 99 - protein, 112 aa, Artificial Sequence
  source: /note="Description of Artificial Sequence: Synthetic polypeptide"
ARNGDHCPLGPGRCCRLHTVRASLEDLGWADWVLSPREVQVTMCIGACPSQFRAANMHAQIKTSLHRLKNDTVPAPCCVPASYNPMVLIQKTDTNVSLQTYDDLLAKDCHCI

SEQ ID NO: 100 - protein, 112 aa, Artificial Sequence
  source: /note="Description of Artificial Sequence: Synthetic polypeptide"
ARNGDHCPLGPGRCCRLHTVRASLEDLGWADWVLSPREVQVTMCIGACPSQFRAANMHAQIKTSLHRLKPDTVPAPCCVPASYNPMVLINKTDTNVSLQTYDDLLAKDCHCI

SEQ ID NO: 101 - protein, 112 aa, Artificial Sequence
  source: /note="Description of Artificial Sequence: Synthetic polypeptide"
ARNGDHCPLGPGRCCRLHTVRASLEDLGWADWVLSPREVQVTMCIGACPSQFRAANMHAQIKTSLHRLKPDTVPAPCCVPASYNPMVLINKTDTGVSNQTYDDLLAKDCHCI

SEQ ID NO: 102 - protein, 112 aa, Artificial Sequence
  source: /note="Description of Artificial Sequence: Synthetic polypeptide"
ARNGDHCPLGPGRCCRLHTVRASLEDLGWADWVLSPREVQVTMCIGACPSQFRAANMHAQIKTSLHRLKPDTVPAPCCVPASYNPMVLIQKTDTNVSNQTYDDLLAKDCHCI

SEQ ID NO: 103 - protein, 131 aa, Artificial Sequence
  source: /note="Description of Artificial Sequence: Synthetic polypeptide"
MEWSWVFLFFLSVTTGVHSARNGDHCPLGPGRCCRLHTVRASLEDLGWADWVLSPREVQVTMCIGACPSQFRAANMHAQIKTSLHRLKPDTVPAPCCVPASYNPMVLIQKTDTGVSLQTYDDLLAKDCHCI

SEQ ID NO: 104 - protein, 131 aa, Artificial Sequence
  source: /note="Description of Artificial Sequence: Synthetic polypeptide"
MEWSWVFLFFLSVTTGVHSARNGDDCPLGPGRCCRLHTVRASLEDLGWADWVLSPREVQVTMCIGACPSQFRAANMHAQIKTSLHRLKPDTVPAPCCVPASYNPMVLIQKTDTGVSLQTYDDLLAKDCHCI

SEQ ID NO: 105 - protein, 112 aa, Artificial Sequence
  source: /note="Description of Artificial Sequence: Synthetic polypeptide"
ARNGDDCPLGPGRCCRLHTVRASLEDLGWADWVLSPREVQVTMCIGACPSQFRAANMHAQIKTSLHRLKPDTVPAPCCVPASYNPMVLIQKTDTGVSLQTYDDLLAKDCHCI

SEQ ID NO: 106 - protein, 131 aa, Artificial Sequence
  source: /note="Description of Artificial Sequence: Synthetic polypeptide"
MEWSWVFLFFLSVTTGVHSARQGDHCPLGPGRCCRLHTVRASLEDLGWADWVLSPREVQVTMCIGACPSQFRAANMHAQIKTSLHRLKPDTVPAPCCVPASYNPMVLIQKTDTGVSLQTYDDLLAKDCHCI

SEQ ID NO: 107 - protein, 112 aa, Artificial Sequence
  source: /note="Description of Artificial Sequence: Synthetic polypeptide"
ARQGDHCPLGPGRCCRLHTVRASLEDLGWADWVLSPREVQVTMCIGACPSQFRAANMHAQIKTSLHRLKPDTVPAPCCVPASYNPMVLIQKTDTGVSLQTYDDLLAKDCHCI

SEQ ID NO: 108 - protein, 217 aa, Artificial Sequence
  source: /note="Description of Artificial Sequence: Synthetic polypeptide"
APELLGGPSVFLFPPKPKDTLMISRTPEVTCVVVDVSHEDPEVKFNWYVDGVEVHNAKTKPREEQYNSTYRVVSVLTVLHQDWLNGKEYKCKVSNKALPAPIEKTISKAKGQPREPQVYTLPPSRKEMTKNQVSLTCLVKGFYPSDIAVEWESNGQPENNYKTTPPVLKSDGSFFLYSKLTVDKSRWQQGNVFSCSVMHEALHNHYTQKSLSLSPGK

SEQ ID NO: 109 - protein, 348 aa, Artificial Sequence
  source: /note="Description of Artificial Sequence: Synthetic polypeptide"
APELLGGPSVFLFPPKPKDTLMISRTPEVTCVVVDVSHEDPEVKFNWYVDGVEVHNAKTKPREEQYNSTYRVVSVLTVLHQDWLNGKEYKCKVSNKALPAPIEKTISKAKGQPREPQVYTLPPSREEMTKNQVSLTCLVKGFYPSDIAVEWESNGQPENNYDTTPPVLDSDGSFFLYSDLTVDKSRWQQGNVFSCSVMHEALHNHYTQKSLSLSPGGGGGSGGGGSGGGGSGGGGSARNGDHCPLGPGRCCRLHTVRASLEDLGWADWVLSPREVQVTMCIGACPSQFRAANMHAQIKTSLHRLKPDTVPAPCCVPASYNPMVLIQKTDTGVSLQTYDDLLAKDCHCI

SEQ ID NO: 110 - protein, 236 aa, Artificial Sequence
  source: /note="Description of Artificial Sequence: Synthetic polypeptide"
MEWSWVFLFFLSVTTGVHSAPELLGGPSVFLFPPKPKDTLMISRTPEVTCVVVDVSHEDPEVKFNWYVDGVEVHNAKTKPREEQYNSTYRVVSVLTVLHQDWLNGKEYKCKVSNKALPAPIEKTISKAKGQPREPQVYTLPPSRKEMTKNQVSLTCLVKGFYPSDIAVEWESNGQPENNYKTTPPVLKSDGSFFLYSKLTVDKSRWQQGNVFSCSVMHEALHNHYTQKSLSLSPGK

SEQ ID NO: 111 - protein, 367 aa, Artificial Sequence
  source: /note="Description of Artificial Sequence: Synthetic polypeptide"
MEWSWVFLFFLSVTTGVHSAPELLGGPSVFLFPPKPKDTLMISRTPEVTCVVVDVSHEDPEVKFNWYVDGVEVHNAKTKPREEQYNSTYRVVSVLTVLHQDWLNGKEYKCKVSNKALPAPIEKTISKAKGQPREPQVYTLPPSREEMTKNQVSLTCLVKGFYPSDIAVEWESNGQPENNYDTTPPVLDSDGSFFLYSDLTVDKSRWQQGNVFSCSVMHEALHNHYTQKSLSLSPGGGGGSGGGGSGGGGSGGGGSARNGDHCPLGPGRCCRLHTVRASLEDLGWADWVLSPREVQVTMCIGACPSQFRAANMHAQIKTSLHRLKPDTVPAPCCVPASYNPMVLIQKTDTGVSLQTYDDLLAKDCHCI

SEQ ID NO: 112 - protein, 217 aa, Artificial Sequence
  source: /note="Description of Artificial Sequence: Synthetic polypeptide"
APELLGGPSVFLFPPKPKDTLMISRTPEVTCVVVDVSHEDPEVKFNWYVDGVEVHNAKTKPREEQYNSTYRVVSVLTVLHQDWLNGKEYKCKVSNKALPAPIEKTISKAKGQPREPQVYTLPPSREEMTKNQVSLTCLVKGFYPSDIAVEWESNGQPENNYDTTPPVLDSDGSFFLYSDLTVDKSRWQQGNVFSCSVMHEALHNHYTQKSLSLSPGK

SEQ ID NO: 113 - protein, 348 aa, Artificial Sequence
  source: /note="Description of Artificial Sequence: Synthetic polypeptide"
APELLGGPSVFLFPPKPKDTLMISRTPEVTCVVVDVSHEDPEVKFNWYVDGVEVHNAKTKPREEQYNSTYRVVSVLTVLHQDWLNGKEYKCKVSNKALPAPIEKTISKAKGQPREPQVYTLPPSRKEMTKNQVSLTCLVKGFYPSDIAVEWESNGQPENNYKTTPPVLKSDGSFFLYSKLTVDKSRWQQGNVFSCSVMHEALHNHYTQKSLSLSPGGGGGSGGGGSGGGGSGGGGSARNGDHCPLGPGRCCRLHTVRASLEDLGWADWVLSPREVQVTMCIGACPSQFRAANMHAQIKTSLHRLKPDTVPAPCCVPASYNPMVLIQKTDTGVSLQTYDDLLAKDCHCI

SEQ ID NO: 114 - protein, 236 aa, Artificial Sequence
  source: /note="Description of Artificial Sequence: Synthetic polypeptide"
MEWSWVFLFFLSVTTGVHSAPELLGGPSVFLFPPKPKDTLMISRTPEVTCVVVDVSHEDPEVKFNWYVDGVEVHNAKTKPREEQYNSTYRVVSVLTVLHQDWLNGKEYKCKVSNKALPAPIEKTISKAKGQPREPQVYTLPPSREEMTKNQVSLTCLVKGFYPSDIAVEWESNGQPENNYDTTPPVLDSDGSFFLYSDLTVDKSRWQQGNVFSCSVMHEALHNHYTQKSLSLSPGK

SEQ ID NO: 115 - protein, 367 aa, Artificial Sequence
  source: /note="Description of Artificial Sequence: Synthetic polypeptide"
MEWSWVFLFFLSVTTGVHSAPELLGGPSVFLFPPKPKDTLMISRTPEVTCVVVDVSHEDPEVKFNWYVDGVEVHNAKTKPREEQYNSTYRVVSVLTVLHQDWLNGKEYKCKVSNKALPAPIEKTISKAKGQPREPQVYTLPPSRKEMTKNQVSLTCLVKGFYPSDIAVEWESNGQPENNYKTTPPVLKSDGSFFLYSKLTVDKSRWQQGNVFSCSVMHEALHNHYTQKSLSLSPGGGGGSGGGGSGGGGSGGGGSARNGDHCPLGPGRCCRLHTVRASLEDLGWADWVLSPREVQVTMCIGACPSQFRAANMHAQIKTSLHRLKPDTVPAPCCVPASYNPMVLIQKTDTGVSLQTYDDLLAKDCHCI

SEQ ID NO: 116 - protein, 348 aa, Artificial Sequence
  source: /note="Description of Artificial Sequence: Synthetic polypeptide"
APELLGGPSVFLFPPKPKDTLMISRTPEVTCVVVDVSHEDPEVKFNWYVDGVEVHNAKTKPREEQYNSTYRVVSVLTVLHQDWLNGKEYKCKVSNKALPAPIEKTISKAKGQPREPQVYTLPPSREEMTKNQVSLTCLVKGFYPSDIAVEWESNGQPENNYDTTPPVLDSDGSFFLYSDLTVDKSRWQQGNVFSCSVMHEALHNHYTQKSLSLSPGGGGGSGGGGSGGGGSGGGGSARNGDDCPLGPGRCCRLHTVRASLEDLGWADWVLSPREVQVTMCIGACPSQFRAANMHAQIKTSLHRLKPDTVPAPCCVPASYNPMVLIQKTDTGVSLQTYDDLLAKDCHCI

SEQ ID NO: 117 - protein, 367 aa, Artificial Sequence
  source: /note="Description of Artificial Sequence: Synthetic polypeptide"
MEWSWVFLFFLSVTTGVHSAPELLGGPSVFLFPPKPKDTLMISRTPEVTCVVVDVSHEDPEVKFNWYVDGVEVHNAKTKPREEQYNSTYRVVSVLTVLHQDWLNGKEYKCKVSNKALPAPIEKTISKAKGQPREPQVYTLPPSREEMTKNQVSLTCLVKGFYPSDIAVEWESNGQPENNYDTTPPVLDSDGSFFLYSDLTVDKSRWQQGNVFSCSVMHEALHNHYTQKSLSLSPGGGGGSGGGGSGGGGSGGGGSARNGDDCPLGPGRCCRLHTVRASLEDLGWADWVLSPREVQVTMCIGACPSQFRAANMHAQIKTSLHRLKPDTVPAPCCVPASYNPMVLIQKTDTGVSLQTYDDLLAKDCHCI

SEQ ID NO: 118 - protein, 348 aa, Artificial Sequence
  source: /note="Description of Artificial Sequence: Synthetic polypeptide"
APELLGGPSVFLFPPKPKDTLMISRTPEVTCVVVDVSHEDPEVKFNWYVDGVEVHNAKTKPREEQYNSTYRVVSVLTVLHQDWLNGKEYKCKVSNKALPAPIEKTISKAKGQPREPQVYTLPPSRKEMTKNQVSLTCLVKGFYPSDIAVEWESNGQPENNYKTTPPVLKSDGSFFLYSKLTVDKSRWQQGNVFSCSVMHEALHNHYTQKSLSLSPGGGGGSGGGGSGGGGSGGGGSARNGDDCPLGPGRCCRLHTVRASLEDLGWADWVLSPREVQVTMCIGACPSQFRAANMHAQIKTSLHRLKPDTVPAPCCVPASYNPMVLIQKTDTGVSLQTYDDLLAKDCHCI

SEQ ID NO: 119 - protein, 367 aa, Artificial Sequence
  source: /note="Description of Artificial Sequence: Synthetic polypeptide"
MEWSWVFLFFLSVTTGVHSAPELLGGPSVFLFPPKPKDTLMISRTPEVTCVVVDVSHEDPEVKFNWYVDGVEVHNAKTKPREEQYNSTYRVVSVLTVLHQDWLNGKEYKCKVSNKALPAPIEKTISKAKGQPREPQVYTLPPSRKEMTKNQVSLTCLVKGFYPSDIAVEWESNGQPENNYKTTPPVLKSDGSFFLYSKLTVDKSRWQQGNVFSCSVMHEALHNHYTQKSLSLSPGGGGGSGGGGSGGGGSGGGGSARNGDDCPLGPGRCCRLHTVRASLEDLGWADWVLSPREVQVTMCIGACPSQFRAANMHAQIKTSLHRLKPDTVPAPCCVPASYNPMVLIQKTDTGVSLQTYDDLLAKDCHCI

SEQ ID NO: 120 - protein, 348 aa, Artificial Sequence
  source: /note="Description of Artificial Sequence: Synthetic polypeptide"
APELLGGPSVFLFPPKPKDTLMISRTPEVTCVVVDVSHEDPEVKFNWYVDGVEVHNAKTKPREEQYNSTYRVVSVLTVLHQDWLNGKEYKCKVSNKALPAPIEKTISKAKGQPREPQVYTLPPSRKEMTKNQVSLTCLVKGFYPSDIAVEWESNGQPENNYKTTPPVLKSDGSFFLYSKLTVDKSRWQQGNVFSCSVMHEALHNHYTQKSLSLSPGGGGGSGGGGSGGGGSGGGGSARQGDHCPLGPGRCCRLHTVRASLEDLGWADWVLSPREVQVTMCIGACPSQFRAANMHAQIKTSLHRLKPDTVPAPCCVPASYNPMVLIQKTDTGVSLQTYDDLLAKDCHCI

SEQ ID NO: 121 - protein, 367 aa, Artificial Sequence
  source: /note="Description of Artificial Sequence: Synthetic polypeptide"
MEWSWVFLFFLSVTTGVHSAPELLGGPSVFLFPPKPKDTLMISRTPEVTCVVVDVSHEDPEVKFNWYVDGVEVHNAKTKPREEQYNSTYRVVSVLTVLHQDWLNGKEYKCKVSNKALPAPIEKTISKAKGQPREPQVYTLPPSRKEMTKNQVSLTCLVKGFYPSDIAVEWESNGQPENNYKTTPPVLKSDGSFFLYSKLTVDKSRWQQGNVFSCSVMHEALHNHYTQKSLSLSPGGGGGSGGGGSGGGGSGGGGSARQGDHCPLGPGRCCRLHTVRASLEDLGWADWVLSPREVQVTMCIGACPSQFRAANMHAQIKTSLHRLKPDTVPAPCCVPASYNPMVLIQKTDTGVSLQTYDDLLAKDCHCI

SEQ ID NO: 122 - protein, 328 aa, Artificial Sequence
  source: /note="Description of Artificial Sequence: Synthetic polypeptide"
APELLGGPSVFLFPPKPKDTLMISRTPEVTCVVVDVSHEDPEVKFNWYVDGVEVHNAKTKPREEQYNSTYRVVSVLTVLHQDWLNGKEYKCKVSNKALPAPIEKTISKAKGQPREPQVYTLPPSRKEMTKNQVSLTCLVKGFYPSDIAVEWESNGQPENNYKTTPPVLKSDGSFFLYSKLTVDKSRWQQGNVFSCSVMHEALHNHYTQKSLSLSPGARNGDHCPLGPGRCCRLHTVRASLEDLGWADWVLSPREVQVTMCIGACPSQFRAANMHAQIKTSLHRLKPDTVPAPCCVPASYNPMVLIQKTDTGVSLQTYDDLLAKDCHCI

SEQ ID NO: 123 - protein, 347 aa, Artificial Sequence
  source: /note="Description of Artificial Sequence: Synthetic polypeptide"
MEWSWVFLFFLSVTTGVHSAPELLGGPSVFLFPPKPKDTLMISRTPEVTCVVVDVSHEDPEVKFNWYVDGVEVHNAKTKPREEQYNSTYRVVSVLTVLHQDWLNGKEYKCKVSNKALPAPIEKTISKAKGQPREPQVYTLPPSRKEMTKNQVSLTCLVKGFYPSDIAVEWESNGQPENNYKTTPPVLKSDGSFFLYSKLTVDKSRWQQGNVFSCSVMHEALHNHYTQKSLSLSPGARNGDHCPLGPGRCCRLHTVRASLEDLGWADWVLSPREVQVTMCIGACPSQFRAANMHAQIKTSLHRLKPDTVPAPCCVPASYNPMVLIQKTDTGVSLQTYDDLLAKDCHCI

SEQ ID NO: 124 - protein, 332 aa, Artificial Sequence
  source: /note="Description of Artificial Sequence: Synthetic polypeptide"
APELLGGPSVFLFPPKPKDTLMISRTPEVTCVVVDVSHEDPEVKFNWYVDGVEVHNAKTKPREEQYNSTYRVVSVLTVLHQDWLNGKEYKCKVSNKALPAPIEKTISKAKGQPREPQVYTLPPSRKEMTKNQVSLTCLVKGFYPSDIAVEWESNGQPENNYKTTPPVLKSDGSFFLYSKLTVDKSRWQQGNVFSCSVMHEALHNHYTQKSLSLSPGGGGGARNGDHCPLGPGRCCRLHTVRASLEDLGWADWVLSPREVQVTMCIGACPSQFRAANMHAQIKTSLHRLKPDTVPAPCCVPASYNPMVLIQKTDTGVSLQTYDDLLAKDCHCI

SEQ ID NO: 125 - protein, 351 aa, Artificial Sequence
  source: /note="Description of Artificial Sequence: Synthetic polypeptide"
MEWSWVFLFFLSVTTGVHSAPELLGGPSVFLFPPKPKDTLMISRTPEVTCVVVDVSHEDPEVKFNWYVDGVEVHNAKTKPREEQYNSTYRVVSVLTVLHQDWLNGKEYKCKVSNKALPAPIEKTISKAKGQPREPQVYTLPPSRKEMTKNQVSLTCLVKGFYPSDIAVEWESNGQPENNYKTTPPVLKSDGSFFLYSKLTVDKSRWQQGNVFSCSVMHEALHNHYTQKSLSLSPGGGGGARNGDHCPLGPGRCCRLHTVRASLEDLGWADWVLSPREVQVTMCIGACPSQFRAANMHAQIKTSLHRLKPDTVPAPCCVPASYNPMVLIQKTDTGVSLQTYDDLLAKDCHCI

SEQ ID NO: 126 - protein, 338 aa, Artificial Sequence
  source: /note="Description of Artificial Sequence: Synthetic polypeptide"
APELLGGPSVFLFPPKPKDTLMISRTPEVTCVVVDVSHEDPEVKFNWYVDGVEVHNAKTKPREEQYNSTYRVVSVLTVLHQDWLNGKEYKCKVSNKALPAPIEKTISKAKGQPREPQVYTLPPSRKEMTKNQVSLTCLVKGFYPSDIAVEWESNGQPENNYKTTPPVLKSDGSFFLYSKLTVDKSRWQQGNVFSCSVMHEALHNHYTQKSLSLSPGGGGGSGGGGSARNGDHCPLGPGRCCRLHTVRASLEDLGWADWVLSPREVQVTMCIGACPSQFRAANMHAQIKTSLHRLKPDTVPAPCCVPASYNPMVLIQKTDTGVSLQTYDDLLAKDCHCI

SEQ ID NO: 127 - protein, 357 aa, Artificial Sequence
  source: /note="Description of Artificial Sequence: Synthetic polypeptide"
MEWSWVFLFFLSVTTGVHSAPELLGGPSVFLFPPKPKDTLMISRTPEVTCVVVDVSHEDPEVKFNWYVDGVEVHNAKTKPREEQYNSTYRVVSVLTVLHQDWLNGKEYKCKVSNKALPAPIEKTISKAKGQPREPQVYTLPPSRKEMTKNQVSLTCLVKGFYPSDIAVEWESNGQPENNYKTTPPVLKSDGSFFLYSKLTVDKSRWQQGNVFSCSVMHEALHNHYTQKSLSLSPGGGGGSGGGGSARNGDHCPLGPGRCCRLHTVRASLEDLGWADWVLSPREVQVTMCIGACPSQFRAANMHAQIKTSLHRLKPDTVPAPCCVPASYNPMVLIQKTDTGVSLQTYDDLLAKDCHCI

SEQ ID NO: 128 - protein, 348 aa, Artificial Sequence
  source: /note="Description of Artificial Sequence: Synthetic polypeptide"
APELLGGPSVFLFPPKPKDTLMISRTPEVTCVVVDVSHEDPEVKFNWYVDGVEVHNAKTKPREEQYNSTYRVVSVLTVLHQDWLNGKEYKCKVSNKALPAPIEKTISKAKGQPREPQVYTLPPSRKEMTKNQVSLTCLVKGFYPSDIAVEWESNGQPENNYKTTPPVLKSDGSFFLYSKLTVDKSRWQQGNVFSCSVMHEALHNHYTQKSLSLSPGGGGGQGGGGQGGGGQGGGGQARNGDHCPLGPGRCCRLHTVRASLEDLGWADWVLSPREVQVTMCIGACPSQFRAANMHAQIKTSLHRLKPDTVPAPCCVPASYNPMVLIQKTDTGVSLQTYDDLLAKDCHCI

SEQ ID NO: 129 - protein, 367 aa, Artificial Sequence
  source: /note="Description of Artificial Sequence: Synthetic polypeptide"
MEWSWVFLFFLSVTTGVHSAPELLGGPSVFLFPPKPKDTLMISRTPEVTCVVVDVSHEDPEVKFNWYVDGVEVHNAKTKPREEQYNSTYRVVSVLTVLHQDWLNGKEYKCKVSNKALPAPIEKTISKAKGQPREPQVYTLPPSRKEMTKNQVSLTCLVKGFYPSDIAVEWESNGQPENNYKTTPPVLKSDGSFFLYSKLTVDKSRWQQGNVFSCSVMHEALHNHYTQKSLSLSPGGGGGQGGGGQGGGGQGGGGQARNGDHCPLGPGRCCRLHTVRASLEDLGWADWVLSPREVQVTMCIGACPSQFRAANMHAQIKTSLHRLKPDTVPAPCCVPASYNPMVLIQKTDTGVSLQTYDDLLAKDCHCI

SEQ ID NO: 130 - protein, 217 aa, Artificial Sequence
  source: /note="Description of Artificial Sequence: Synthetic polypeptide"
APELLGGPSVFLFPPKPKDTLMISRTPEVTCVVVDVSHEDPEVKFNWYVDGVEVHNAKTKPREEQYNSTYRVVSVLTVLHQDWLNGKEYKCKVSNKALPAPIEKTISKAKGQPREPQVYTCPPSREEMTKNQVSLTCLVKGFYPSDIAVEWESNGQPENNYDTTPPVLDSDGSFFLYSDLTVDKSRWQQGNVFSCSVMHEALHNHYTQKSLSLSPGK

SEQ ID NO: 131 - protein, 332 aa, Artificial Sequence
  source: /note="Description of Artificial Sequence: Synthetic polypeptide"
APELLGGPSVFLFPPKPKDTLMISRTPEVTCVVVDVSHEDPEVKFNWYVDGVEVHNAKTKPREEQYNSTYRVVSVLTVLHQDWLNGKEYKCKVSNKALPAPIEKTISKAKGQPREPQVYTCPPSRKEMTKNQVSLTCLVKGFYPSDIAVEWESNGQPENNYKTTPPVLKSDGSFFLYSKLTVDKSRWQQGNVFSCSVMHEALHNHYTQKSLSLSPGGGGGARNGDHCPLGPGRCCRLHTVRASLEDLGWADWVLSPREVQVTMCIGACPSQFRAANMHAQIKTSLHRLKPDTVPAPCCVPASYNPMVLIQKTDTGVSLQTYDDLLAKDCHCI

SEQ ID NO: 132 - protein, 236 aa, Artificial Sequence
  source: /note="Description of Artificial Sequence: Synthetic polypeptide"
MEWSWVFLFFLSVTTGVHSAPELLGGPSVFLFPPKPKDTLMISRTPEVTCVVVDVSHEDPEVKFNWYVDGVEVHNAKTKPREEQYNSTYRVVSVLTVLHQDWLNGKEYKCKVSNKALPAPIEKTISKAKGQPREPQVYTCPPSREEMTKNQVSLTCLVKGFYPSDIAVEWESNGQPENNYDTTPPVLDSDGSFFLYSDLTVDKSRWQQGNVFSCSVMHEALHNHYTQKSLSLSPGK

SEQ ID NO: 133 - protein, 351 aa, Artificial Sequence
  source: /note="Description of Artificial Sequence: Synthetic polypeptide"
MEWSWVFLFFLSVTTGVHSAPELLGGPSVFLFPPKPKDTLMISRTPEVTCVVVDVSHEDPEVKFNWYVDGVEVHNAKTKPREEQYNSTYRVVSVLTVLHQDWLNGKEYKCKVSNKALPAPIEKTISKAKGQPREPQVYTCPPSRKEMTKNQVSLTCLVKGFYPSDIAVEWESNGQPENNYKTTPPVLKSDGSFFLYSKLTVDKSRWQQGNVFSCSVMHEALHNHYTQKSLSLSPGGGGGARNGDHCPLGPGRCCRLHTVRASLEDLGWADWVLSPREVQVTMCIGACPSQFRAANMHAQIKTSLHRLKPDTVPAPCCVPASYNPMVLIQKTDTGVSLQTYDDLLAKDCHCI

SEQ ID NO: 134 - protein, 217 aa, Artificial Sequence
  source: /note="Description of Artificial Sequence: Synthetic polypeptide"
APELLGGPSVFLFPPKPKDTLMISRTPEVTCVVVDVSHEDPEVKFNWYVDGVEVHNAKTKPREEQYNSTYRVVSVLTVLHQDWLNGKEYKCKVSNKALPAPIEKTISKAKGQPREPQVCTLPPSREEMTKNQVSLTCLVKGFYPSDIAVEWESNGQPENNYDTTPPVLDSDGSFFLYSDLTVDKSRWQQGNVFSCSVMHEALHNHYTQKSLSLSPGK

SEQ ID NO: 135 - protein, 332 aa, Artificial Sequence
  source: /note="Description of Artificial Sequence: Synthetic polypeptide"
APELLGGPSVFLFPPKPKDTLMISRTPEVTCVVVDVSHEDPEVKFNWYVDGVEVHNAKTKPREEQYNSTYRVVSVLTVLHQDWLNGKEYKCKVSNKALPAPIEKTISKAKGQPREPQVYTLPPCRKEMTKNQVSLTCLVKGFYPSDIAVEWESNGQPENNYKTTPPVLKSDGSFFLYSKLTVDKSRWQQGNVFSCSVMHEALHNHYTQKSLSLSPGGGGGARNGDHCPLGPGRCCRLHTVRASLEDLGWADWVLSPREVQVTMCIGACPSQFRAANMHAQIKTSLHRLKPDTVPAPCCVPASYNPMVLIQKTDTGVSLQTYDDLLAKDCHCI

SEQ ID NO: 136 - protein, 236 aa, Artificial Sequence
  source: /note="Description of Artificial Sequence: Synthetic polypeptide"
MEWSWVFLFFLSVTTGVHSAPELLGGPSVFLFPPKPKDTLMISRTPEVTCVVVDVSHEDPEVKFNWYVDGVEVHNAKTKPREEQYNSTYRVVSVLTVLHQDWLNGKEYKCKVSNKALPAPIEKTISKAKGQPREPQVCTLPPSREEMTKNQVSLTCLVKGFYPSDIAVEWESNGQPENNYDTTPPVLDSDGSFFLYSDLTVDKSRWQQGNVFSCSVMHEALHNHYTQKSLSLSPGK

SEQ ID NO: 137 - protein, 351 aa, Artificial Sequence
  source: /note="Description of Artificial Sequence: Synthetic polypeptide"
MEWSWVFLFFLSVTTGVHSAPELLGGPSVFLFPPKPKDTLMISRTPEVTCVVVDVSHEDPEVKFNWYVDGVEVHNAKTKPREEQYNSTYRVVSVLTVLHQDWLNGKEYKCKVSNKALPAPIEKTISKAKGQPREPQVYTLPPCRKEMTKNQVSLTCLVKGFYPSDIAVEWESNGQPENNYKTTPPVLKSDGSFFLYSKLTVDKSRWQQGNVFSCSVMHEALHNHYTQKSLSLSPGGGGGARNGDHCPLGPGRCCRLHTVRASLEDLGWADWVLSPREVQVTMCIGACPSQFRAANMHAQIKTSLHRLKPDTVPAPCCVPASYNPMVLIQKTDTGVSLQTYDDLLAKDCHCI

SEQ ID NO: 138 - protein, 227 aa, Artificial Sequence
  source: /note="Description of Artificial Sequence: Synthetic polypeptide"
DKTHTCPPCPAPELLGGPSVFLFPPKPKDTLMISRTPEVTCVVVDVSHEDPEVKFNWYVDGVEVHNAKTKPREEQYNSTYRVVSVLTVLHQDWLNGKEYKCKVSNKALPAPIEKTISKAKGQPREPQVYTLPPSRKEMTKNQVSLTCLVKGFYPSDIAVEWESNGQPENNYKTTPPVLKSDGSFFLYSKLTVDKSRWQQGNVFSCSVMHEALHNHYTQKSLSLSPGK

SEQ ID NO: 139 - protein, 358 aa, Artificial Sequence
  source: /note="Description of Artificial Sequence: Synthetic polypeptide"
DKTHTCPPCPAPELLGGPSVFLFPPKPKDTLMISRTPEVTCVVVDVSHEDPEVKFNWYVDGVEVHNAKTKPREEQYNSTYRVVSVLTVLHQDWLNGKEYKCKVSNKALPAPIEKTISKAKGQPREPQVYTLPPSREEMTKNQVSLTCLVKGFYPSDIAVEWESNGQPENNYDTTPPVLDSDGSFFLYSDLTVDKSRWQQGNVFSCSVMHEALHNHYTQKSLSLSPGGGGGSGGGGSGGGGSGGGGSARNGDHCPLGPGRCCRLHTVRASLEDLGWADWVLSPREVQVTMCIGACPSQFRAANMHAQIKTSLHRLKPDTVPAPCCVPASYNPMVLIQKTDTGVSLQTYDDLLAKDCHCI

SEQ ID NO: 140 - protein, 246 aa, Artificial Sequence
  source: /note="Description of Artificial Sequence: Synthetic polypeptide"
MEWSWVFLFFLSVTTGVHSDKTHTCPPCPAPELLGGPSVFLFPPKPKDTLMISRTPEVTCVVVDVSHEDPEVKFNWYVDGVEVHNAKTKPREEQYNSTYRVVSVLTVLHQDWLNGKEYKCKVSNKALPAPIEKTISKAKGQPREPQVYTLPPSRKEMTKNQVSLTCLVKGFYPSDIAVEWESNGQPENNYKTTPPVLKSDGSFFLYSKLTVDKSRWQQGNVFSCSVMHEALHNHYTQKSLSLSPGK

SEQ ID NO: 141 - protein, 377 aa, Artificial Sequence
  source: /note="Description of Artificial Sequence: Synthetic polypeptide"
MEWSWVFLFFLSVTTGVHSDKTHTCPPCPAPELLGGPSVFLFPPKPKDTLMISRTPEVTCVVVDVSHEDPEVKFNWYVDGVEVHNAKTKPREEQYNSTYRVVSVLTVLHQDWLNGKEYKCKVSNKALPAPIEKTISKAKGQPREPQVYTLPPSREEMTKNQVSLTCLVKGFYPSDIAVEWESNGQPENNYDTTPPVLDSDGSFFLYSDLTVDKSRWQQGNVFSCSVMHEALHNHYTQKSLSLSPGGGGGSGGGGSGGGGSGGGGSARNGDHCPLGPGRCCRLHTVRASLEDLGWADWVLSPREVQVTMCIGACPSQFRAANMHAQIKTSLHRLKPDTVPAPCCVPASYNPMVLIQKTDTGVSLQTYDDLLAKDCHCI

SEQ ID NO: 142 - protein, 630 aa, Artificial Sequence
  source: /note="Description of Artificial Sequence: Synthetic polypeptide"
GGGERKSSVECPPCPAPPVAGPSVFLFPPKPKDTLMISRTPEVTCVVVDVSHEDPEVQFNWYVDGVEVHNAKTKPREEQFNSTFRVVSVLTVVHQDWLNGKEYKCKVSNKGLPAPIEKTISKTKGQPREPQVYTLPPSREEMTKNQVSLTCLVKGFYPSDIAVEWESNGQPENNYKTTPPMLDSDGSFFLYSKLTVDKSRWQQGNVFSCSVMHEALHNHYTQKSLSLSPGGGGGSGGGGSGGGGSGGGGSGGGGSGGGGSGGGGSGGGGSERKSSVECPPCPAPPVAGPSVFLFPPKPKDTLMISRTPEVTCVVVDVSHEDPEVQFNWYVDGVEVHNAKTKPREEQFNSTFRVVSVLTVVHQDWLNGKEYKCKVSNKGLPAPIEKTISKTKGQPREPQVYTLPPSREEMTKNQVSLTCLVKGFYPSDIAVEWESNGQPENNYKTTPPMLDSDGSFFLYSKLTVDKSRWQQGNVFSCSVMHEALHNHYTQKSLSLSPGSGGGGSGGGGSGGGGSGGGGSARNGDHCPLGPGRCCRLHTVRASLEDLGWADWVLSPREVQVTMCIGACPSQFRAANMHAQIKTSLHRLKPDTVPAPCCVPASYNPMVLIQKTDTGVSLQTYDDLLAKDCHCI

SEQ ID NO: 143 - protein, 649 aa, Artificial Sequence [sequence omitted]

SEQ ID NO: 144 - protein, 605 aa, Artificial Sequence
  source: /note="Description of Artificial Sequence: Synthetic polypeptide"
GGGERKSSVECPPCPAPPVAGPSVFLFPPKPKDTLMISRTPEVTCVVVDVSHEDPEVQFNWYVDGVEVHNAKTKPREEQFNSTFRVVSVLTVVHQDWLNGKEYKCKVSNKGLPAPIEKTISKTKGQPREPQVYTLPPSREEMTKNQVSLTCLVKGFYPSDIAVEWESNGQPENNYKTTPPMLDSDGSFFLYSKLTVDKSRWQQGNVFSCSVMHEALHNHYTQKSLSLSPGGGGGSGGGGSGGGGSERKSSVECPPCPAPPVAGPSVFLFPPKPKDTLMISRTPEVTCVVVDVSHEDPEVQFNWYVDGVEVHNAKTKPREEQFNSTFRVVSVLTVVHQDWLNGKEYKCKVSNKGLPAPIEKTISKTKGQPREPQVYTLPPSREEMTKNQVSLTCLVKGFYPSDIAVEWESNGQPENNYKTTPPMLDSDGSFFLYSKLTVDKSRWQQGNVFSCSVMHEALHNHYTQKSLSLSPGSGGGGSGGGGSGGGGSGGGGSARNGDHCPLGPGRCCRLHTVRASLEDLGWADWVLSPREVQVTMCIGACPSQFRAANMHAQIKTSLHRLKPDTVPAPCCVPASYNPMVLIQKTDTGVSLQTYDDLLAKDCHCI

SEQ ID NO: 145 - protein, 624 aa, Artificial Sequence
  source: /note="Description of Artificial Sequence: Synthetic polypeptide"
MEWSWVFLFFLSVTTGVHSGGGERKSSVECPPCPAPPVAGPSVFLFPPKPKDTLMISRTPEVTCVVVDVSHEDPEVQFNWYVDGVEVHNAKTKPREEQFNSTFRVVSVLTVVHQDWLNGKEYKCKVSNKGLPAPIEKTISKTKGQPREPQVYTLPPSREEMTKNQVSLTCLVKGFYPSDIAVEWESNGQPENNYKTTPPMLDSDGSFFLYSKLTVDKSRWQQGNVFSCSVMHEALHNHYTQKSLSLSPGGGGGSGGGGSGGGGSERKSSVECPPCPAPPVAGPSVFLFPPKPKDTLMISRTPEVTCVVVDVSHEDPEVQFNWYVDGVEVHNAKTKPREEQFNSTFRVVSVLTVVHQDWLNGKEYKCKVSNKGLPAPIEKTISKTKGQPREPQVYTLPPSREEMTKNQVSLTCLVKGFYPSDIAVEWESNGQPENNYKTTPPMLDSDGSFFLYSKLTVDKSRWQQGNVFSCSVMHEALHNHYTQKSLSLSPGSGGGGSGGGGSGGGGSGGGGSARNGDHCPLGPGRCCRLHTVRASLEDLGWADWVLSPREVQVTMCIGACPSQFRAANMHAQIKTSLHRLKPDTVPAPCCVPASYNPMVLIQKTDTGVSLQTYDDLLAKDCHCI

SEQ ID NO: 146 - protein, 615 aa, Artificial Sequence
  source: /note="Description of Artificial Sequence: Synthetic polypeptide"
GGGERKSSVECPPCPAPPVAGPSVFLFPPKPKDTLMISRTPEVTCVVVDVSHEDPEVQFNWYVDGVEVHNAKTKPREEQFNSTFRVVSVLTVVHQDWLNGKEYKCKVSNKGLPAPIEKTISKTKGQPREPQVYTLPPSREEMTKNQVSLTCLVKGFYPSDIAVEWESNGQPENNYKTTPPMLDSDGSFFLYSKLTVDKSRWQQGNVFSCSVMHEALHNHYTQKSLSLSPGGGGGSGGGGSGGGGSGGGGSGGGGSERKSSVECPPCPAPPVAGPSVFLFPPKPKDTLMISRTPEVTCVVVDVSHEDPEVQFNWYVDGVEVHNAKTKPREEQFNSTFRVVSVLTVVHQDWLNGKEYKCKVSNKGLPAPIEKTISKTKGQPREPQVYTLPPSREEMTKNQVSLTCLVKGFYPSDIAVEWESNGQPENNYKTTPPMLDSDGSFFLYSKLTVDKSRWQQGNVFSCSVMHEALHNHYTQKSLSLSPGSGGGGSGGGGSGGGGSGGGGSARNGDHCPLGPGRCCRLHTVRASLEDLGWADWVLSPREVQVTMCIGACPSQFRAANMHAQIKTSLHRLKPDTVPAPCCVPASYNPMVLIQKTDTGVSLQTYDDLLAKDCHCI

SEQ ID NO: 147 - protein, 634 aa, Artificial Sequence
  source: /note="Description of Artificial Sequence: Synthetic polypeptide"
MEWSWVFLFFLSVTTGVHSGGGERKSSVECPPCPAPPVAGPSVFLFPPKPKDTLMISRTPEVTCVVVDVSHEDPEVQFNWYVDGVEVHNAKTKPREEQFNSTFRVVSVLTVVHQDWLNGKEYKCKVSNKGLPAPIEKTISKTKGQPREPQVYTLPPSREEMTKNQVSLTCLVKGFYPSDIAVEWESNGQPENNYKTTPPMLDSDGSFFLYSKLTVDKSRWQQGNVFSCSVMHEALHNHYTQKSLSLSPGGGGGSGGGGSGGGGSGGGGSGGGGSERKSSVECPPCPAPPVAGPSVFLFPPKPKDTLMISRTPEVTCVVVDVSHEDPEVQFNWYVDGVEVHNAKTKPREEQFNSTFRVVSVLTVVHQDWLNGKEYKCKVSNKGLPAPIEKTISKTKGQPREPQVYTLPPSREEMTKNQVSLTCLVKGFYPSDIAVEWESNGQPENNYKTTPPMLDSDGSFFLYSKLTVDKSRWQQGNVFSCSVMHEALHNHYTQKSLSLSPGSGGGGSGGGGSGGGGSGGGGSARNGDHCPLGPGRCCRLHTVRASLEDLGWADWVLSPREVQVTMCIGACPSQFRAANMHAQIKTSLHRLKPDTVPAPCCVPASYNPMVLIQKTDTGVSLQTYDDLLAKDCHCI

SEQ ID NO: 148 - protein, 112 aa, Artificial Sequence
  source: /note="Description of Artificial Sequence: Synthetic polypeptide"
ARDGDHCPLGPGRCCRLHTVRASLEDLGWADWVLSPREVQVTMCIGACPSQFRAANMHAQIKTSLHRLKPDTVPAPCCVPASYNPMVLIQKTDTGVSLQTYDDLLAKDCHCI

SEQ ID NO: 149 - protein, 109 aa, Artificial Sequence
  source: /note="Description of Artificial Sequence: Synthetic polypeptide"
GDHCPLGPGRCCRLHTVRASLEDLGWADWVLSPREVQVTMCIGACPSQFRAANMHAQIKTSLHRLKPDTVPAPCCVPASYNPMVLIQKTDTGVSLQTYDDLLAKDCHCI

SEQ ID NO: 150 - protein, 328 aa, Artificial Sequence
  source: /note="Description of Artificial Sequence: Synthetic polypeptide"
APELLGGPSVFLFPPKPKDTLMISRTPEVTCVVVDVSHEDPEVKFNWYVDGVEVHNAKTKPREEQYNSTYRVVSVLTVLHQDWLNGKEYKCKVSNKALPAPIEKTISKAKGQPREPQVTTLPPSREEMTKNQVSLTCLVKGFYPSDIAVEWESNGQPENNYDTTPPVLDSDGSFFLYSDLTVDKSRWQQGNVFSCSVMHEALHNHYTQKSLSLSPGARNGDHCPLGPGRCCRLHTVRASLEDLGWADWVLSPREVQVTMCIGACPSQFRAANMHAQIKTSLHRLKPDTVPAPCCVPASYNPMVLIQKTDTGVSLQTYDDLLAKDCHCI

SEQ ID NO: 151 - protein, 348 aa, Artificial Sequence
  source: /note="Description of Artificial Sequence: Synthetic polypeptide"
APELLGGPSVFLFPPKPKDTLMISRTPEVTCVVVDVSHEDPEVKFNWYVDGVEVHNAKTKPREEQYNSTYRVVSVLTVLHQDWLNGKEYKCKVSNKALPAPIEKTISKAKGQPREPQVTTLPPSREEMTKNQVSLTCLVKGFYPSDIAVEWESNGQPENNYDTTPPVLDSDGSFFLYSDLTVDKSRWQQGNVFSCSVMHEALHNHYTQKSLSLSPGGGGGSGGGGSGGGGSGGGGSARNGDHCPLGPGRCCRLHTVRASLEDLGWADWVLSPREVQVTMCIGACPSQFRAANMHAQIKTSLHRLKPDTVPAPCCVPASYNPMVLIQKTDTGVSLQTYDDLLAKDCHCI

SEQ ID NO: 152 - protein, 348 aa, Artificial Sequence
  source: /note="Description of Artificial Sequence: Synthetic polypeptide"
APELLGGPSVFLFPPKPKDTLMISRTPEVTCVVVDVSHEDPEVKFNWYVDGVEVHNAKTKPREEQYNSTYRVVSVLTVLHQDWLNGKEYKCKVSNKALPAPIEKTISKAKGQPREPQVTTLPPSREEMTKNQVSLTCLVKGFYPSDIAVEWESNGQPENNYDTTPPVLDSDGSFFLYSDLTVDKSRWQQGNVFSCSVMHEALHNHYTQKSLSLSPGGGGGSGGGGSGGGGSGGGGSARNGDDCPLGPGRCCRLHTVRASLEDLGWADWVLSPREVQVTMCIGACPSQFRAANMHAQIKTSLHRLKPDTVPAPCCVPASYNPMVLIQKTDTGVSLQTYDDLLAKDCHCI

SEQ ID NO: 153 - protein, 610 aa, Artificial Sequence
  source: /note="Description of Artificial Sequence: Synthetic polypeptide"
GGGERKSSVECPPCPAPPVAGPSVFLFPPKPKDTLMISRTPEVTCVVVDVSHEDPEVQFNWYVDGVEVHNAKTKPREEQFNSTFRVVSVLTVVHQDWLNGKEYKCKVSNKGLPAPIEKTISKTKGQPREPQVYTLPPSREEMTKNQVSLTCLVKGFYPSDIAVEWESNGQPENNYKTTPPMLDSDGSFFLYSKLTVDKSRWQQGNVFSCSVMHEALHNHYTQKSLSLSPGGGGGSGGGGSGGGGSGGGGSERKSSVECPPCPAPPVAGPSVFLFPPKPKDTLMISRTPEVTCVVVDVSHEDPEVQFNWYVDGVEVHNAKTKPREEQFNSTFRVVSVLTVVHQDWLNGKEYKCKVSNKGLPAPIEKTISKTKGQPREPQVYTLPPSREEMTKNQVSLTCLVKGFYPSDIAVEWESNGQPENNYKTTPPMLDSDGSFFLYSKLTVDKSRWQQGNVFSCSVMHEALHNHYTQKSLSLSPGSGGGGSGGGGSGGGGSGGGGSARNGDHCPLGPGRCCRLHTVRASLEDLGWADWVLSPREVQVTMCIGACPSQFRAANMHAQIKTSLHRLKPDTVPAPCCVPASYNPMVLIQKTDTGVSLQTYDDLLAKDCHCI

SEQ ID NO: 154 - protein, 591 aa, Artificial Sequence
  source: /note="Description of Artificial Sequence: Synthetic polypeptide"
GGGAPPVAGPSVFLFPPKPKDTLMISRTPEVTCVVVDVSHEDPEVQFNWYVDGVEVHNAKTKPREEQFNSTFRVVSVLTVVHQDWLNGKEYKCKVSNKGLPAPIEKTISKTKGQPREPQVYTLPPSREEMTKNQVSLTCLVKGFYPSDIAVEWESNGQPENNYKTTPPMLDSDGSFFLYSKLTVDKSRWQQGNVFSCSVMHEALHNHYTQKSLSLSPGGGGGSGGGGSGGGGSGGGGSGGGGSAPPVAGPSVFLFPPKPKDTLMISRTPEVTCVVVDVSHEDPEVQFNWYVDGVEVHNAKTKPREEQFNSTFRVVSVLTVVHQDWLNGKEYKCKVSNKGLPAPIEKTISKTKGQPREPQVYTLPPSREEMTKNQVSLTCLVKGFYPSDIAVEWESNGQPENNYKTTPPMLDSDGSFFLYSKLTVDKSRWQQGNVFSCSVMHEALHNHYTQKSLSLSPGSGGGGSGGGGSGGGGSGGGGSARNGDHCPLGPGRCCRLHTVRASLEDLGWADWVLSPREVQVTMCIGACPSQFRAANMHAQIKTSLHRLKPDTVPAPCCVPASYNPMVLIQKTDTGVSLQTYDDLLAKDCHCI

SEQ ID NO: 155 - protein, 217 aa, Artificial Sequence
  source: /note="Description of Artificial Sequence: Synthetic polypeptide"
APELLGGPSVFLFPPKPKDTLMISRTPEVTCVVVDVSHEDPEVKFNWYVDGVEVHNAKTKPREEQYNSTYRVVSVLTVLHQDWLNGKEYKCKVSNKALPAPIEKTISKAKGQPREPQVYTLPPSRDELTKNQVSLSCAVKGFYPSDIAVEWESNGQPENNYKTTPPVLDSDGSFFLVSKLTVDKSRWQQGNVFSCSVMHEALHNHYTQKSLSLSPGK

SEQ ID NO: 156 - protein, 348 aa, Artificial Sequence
  source: /note="Description of Artificial Sequence: Synthetic polypeptide"
APELLGGPSVFLFPPKPKDTLMISRTPEVTCVVVDVSHEDPEVKFNWYVDGVEVHNAKTKPREEQYNSTYRVVSVLTVLHQDWLNGKEYKCKVSNKALPAPIEKTISKAKGQPREPQVYTLPPSRDELTKNQVSLWCLVKGFYPSDIAVEWESNGQPENNYKTTPPVLDSDGSFFLYSKLTVDKSRWQQGNVFSCSVMHEALHNHYTQKSLSLSPGGGGGSGGGGSGGGGSGGGGSARNGDHCPLGPGRCCRLHTVRASLEDLGWADWVLSPREVQVTMCIGACPSQFRAANMHAQIKTSLHRLKPDTVPAPCCVPASYNPMVLIQKTDTGVSLQTYDDLLAKDCHCI

SEQ ID NO: 157 - protein, 216 aa, Artificial Sequence
  source: /note="Description of Artificial Sequence: Synthetic polypeptide"
APELLGGPSVFLFPPKPKDTLMISRTPEVTCVVVDVSHEDPEVKFNWYVDGVEVHNAKTKPREEQYNSTYRVVSVLTVLHQDWLNGKEYKCKVSNKALPAPIEKTISKAKGQPREPQVYTLPPSRDELTKNQVSLWCLVKGFYPSDIAVEWESNGQPENNYKTTPPVLDSDGSFFLYSKLTVDKSRWQQGNVFSCSVMHEALHNHYTQKSLSLSPG

SEQ ID NO: 158 - protein, 216 aa, Artificial Sequence
  source: /note="Description of Artificial Sequence: Synthetic polypeptide"
APELLGGPSVFLFPPKPKDTLMISRTPEVTCVVVDVSHEDPEVKFNWYVDGVEVHNAKTKPREEQYNSTYRVVSVLTVLHQDWLNGKEYKCKVSNKALPAPIEKTISKAKGQPREPQVYTLPPSRDELTKNQVSLSCAVKGFYPSDIAVEWESNGQPENNYKTTPPVLDSDGSFFLVSKLTVDKSRWQQGNVFSCSVMHEALHNHYTQKSLSLSPG

SEQ ID NO: 159 - protein, 217 aa, Artificial Sequence; identical to SEQ ID NO: 112
  source: /note="Description of Artificial Sequence: Synthetic polypeptide"

SEQ ID NO: 160 - protein, 351 aa, Artificial Sequence
  source: /note="Description of Artificial Sequence: Synthetic polypeptide"
APELLGGPSVFLFPPKPKDTLMISRTPEVTCVVVDVSHEDPEVKFNWYVDGVEVHNAKTKPREEQYNSTYRVVSVLTVLHQDWLNGKEYKCKVSNKALPAPIEKTISKAKGQPREPQVYTLPPSRKEMTKNQVSLTCLVKGFYPSDIAVEWESNGQPENNYKTTPPVLKSDGSFFLYSKLTVDKSRWQQGNVFSCSVMHEALHNHYTQKSLSLSPGGSGSATGGSGSVASSGSGSATHLARNGDHCPLGPGRCCRLHTVRASLEDLGWADWVLSPREVQVTMCIGACPSQFRAANMHAQIKTSLHRLKPDTVPAPCCVPASYNPMVLIQKTDTGVSLQTYDDLLAKDCHCI

SEQ ID NO: 161 - protein, 216 aa, Artificial Sequence
  source: /note="Description of Artificial Sequence: Synthetic polypeptide"
APELLGGPSVFLFPPKPKDTLMISRTPEVTCVVVDVSHEDPEVKFNWYVDGVEVHNAKTKPREEQYNSTYRVVSVLTVLHQDWLNGKEYKCKVSNKALPAPIEKTISKAKGQPREPQVYTLPPSRKEMTKNQVSLTCLVKGFYPSDIAVEWESNGQPENNYKTTPPVLKSDGSFFLYSKLTVDKSRWQQGNVFSCSVMHEALHNHYTQKSLSLSPG

SEQ ID NO: 162 - protein, 216 aa, Artificial Sequence
  source: /note="Description of Artificial Sequence: Synthetic polypeptide"
APELLGGPSVFLFPPKPKDTLMISRTPEVTCVVVDVSHEDPEVKFNWYVDGVEVHNAKTKPREEQYNSTYRVVSVLTVLHQDWLNGKEYKCKVSNKALPAPIEKTISKAKGQPREPQVYTLPPSREEMTKNQVSLTCLVKGFYPSDIAVEWESNGQPENNYDTTPPVLDSDGSFFLYSDLTVDKSRWQQGNVFSCSVMHEALHNHYTQKSLSLSPG

SEQ ID NO: 163 - protein, 217 aa, Artificial Sequence; identical to SEQ ID NO: 108
  source: /note="Description of Artificial Sequence: Synthetic polypeptide"

SEQ ID NO: 164 - protein, 328 aa, Artificial Sequence
  source: /note="Description of Artificial Sequence: Synthetic polypeptide"
APELLGGPSVFLFPPKPKDTLMISRTPEVTCVVVDVSHEDPEVKFNWYVDGVEVHNAKTKPREEQYNSTYRVVSVLTVLHQDWLNGKEYKCKVSNKALPAPIEKTISKAKGQPREPQVYTLPPSREEMTKNQVSLTCLVKGFYPSDIAVEWESNGQPENNYDTTPPVLDSDGSFFLYSDLTVDKSRWQQGNVFSCSVMHEALHNHYTQKSLSLSPGARNGDHCPLGPGRCCRLHTVRASLEDLGWADWVLSPREVQVTMCIGACPSQFRAANMHAQIKTSLHRLKPDTVPAPCCVPASYNPMVLIQKTDTGVSLQTYDDLLAKDCHCI

SEQ ID NO: 165 - protein, 216 aa, Artificial Sequence; identical to SEQ ID NO: 162
  source: /note="Description of Artificial Sequence: Synthetic polypeptide"

SEQ ID NO: 166 - protein, 216 aa, Artificial Sequence; identical to SEQ ID NO: 161
  source: /note="Description of Artificial Sequence: Synthetic polypeptide"

SEQ ID NO: 167 - protein, 328 aa, Artificial Sequence
  source: /note="Description of Artificial Sequence: Synthetic polypeptide"
APELLGGPSVFLFPPKPKDTLMISRTPEVTCVVVDVSHEDPEVKFNWYVDGVEVHNAKTKPREEQYNSTYRVVSVLTVLHQDWLNGKEYKCKVSNKALPAPIEKTISKAKGQPREPQVYTLPPSREEMTKNQVSLTCLVKGFYPSDIAVEWESNGQPENNYDTTPPVLDSDGSFFLYSDLTVDKSRWQQGNVFSCSVMHEALHNHYTQKSLSLSPGARDGDHCPLGPGRCCRLHTVRASLEDLGWADWVLSPREVQVTMCIGACPSQFRAANMHAQIKTSLHRLKPDTVPAPCCVPASYNPMVLIQKTDTGVSLQTYDDLLAKDCHCI

SEQ ID NO: 168 - protein, 325 aa, Artificial Sequence
  source: /note="Description of Artificial Sequence: Synthetic polypeptide"
APELLGGPSVFLFPPKPKDTLMISRTPEVTCVVVDVSHEDPEVKFNWYVDGVEVHNAKTKPREEQYNSTYRVVSVLTVLHQDWLNGKEYKCKVSNKALPAPIEKTISKAKGQPREPQVYTLPPSREEMTKNQVSLTCLVKGFYPSDIAVEWESNGQPENNYDTTPPVLDSDGSFFLYSDLTVDKSRWQQGNVFSCSVMHEALHNHYTQKSLSLSPGGDHCPLGPGRCCRLHTVRASLEDLGWADWVLSPREVQVTMCIGACPSQFRAANMHAQIKTSLHRLKPDTVPAPCCVPASYNPMVLIQKTDTGVSLQTYDDLLAKDCHCI

SEQ ID NO: 169 - protein, 332 aa, Artificial Sequence
  source: /note="Description of Artificial Sequence: Synthetic polypeptide"
APELLGGPSVFLFPPKPKDTLMISRTPEVTCVVVDVSHEDPEVKFNWYVDGVEVHNAKTKPREEQYNSTYRVVSVLTVLHQDWLNGKEYKCKVSNKALPAPIEKTISKAKGQPREPQVYTLPPSREEMTKNQVSLTCLVKGFYPSDIAVEWESNGQPENNYDTTPPVLDSDGSFFLYSDLTVDKSRWQQGNVFSCSVMHEALHNHYTQKSLSLSPGGGGGARDGDHCPLGPGRCCRLHTVRASLEDLGWADWVLSPREVQVTMCIGACPSQFRAANMHAQIKTSLHRLKPDTVPAPCCVPASYNPMVLIQKTDTGVSLQTYDDLLAKDCHCI

SEQ ID NO: 170 - protein, 333 aa, Artificial Sequence
  source: /note="Description of Artificial Sequence: Synthetic polypeptide"
APELLGGPSVFLFPPKPKDTLMISRTPEVTCVVVDVSHEDPEVKFNWYVDGVEVHNAKTKPREEQYNSTYRVVSVLTVLHQDWLNGKEYKCKVSNKALPAPIEKTISKAKGQPREPQVYTLPPSREEMTKNQVSLTCLVKGFYPSDIAVEWESNGQPENNYDTTPPVLDSDGSFFLYSDLTVDKSRWQQGNVFSCSVMHEALHNHYTQKSLSLSPGGGGGSARNGDHCPLGPGRCCRLHTVRASLEDLGWADWVLSPREVQVTMCIGACPSQFRAANMHAQIKTSLHRLKPDTVPAPCCVPASYNPMVLIQKTDTGVSLQTYDDLLAKDCHCI

SEQ ID NO: 171 - protein, 338 aa, Artificial Sequence
  source: /note="Description of Artificial Sequence: Synthetic polypeptide"
APELLGGPSVFLFPPKPKDTLMISRTPEVTCVVVDVSHEDPEVKFNWYVDGVEVHNAKTKPREEQYNSTYRVVSVLTVLHQDWLNGKEYKCKVSNKALPAPIEKTISKAKGQPREPQVYTLPPSREEMTKNQVSLTCLVKGFYPSDIAVEWESNGQPENNYDTTPPVLDSDGSFFLYSDLTVDKSRWQQGNVFSCSVMHEALHNHYTQKSLSLSPGGGGGSGGGGSARNGDHCPLGPGRCCRLHTVRASLEDLGWADWVLSPREVQVTMCIGACPSQFRAANMHAQIKTSLHRLKPDTVPAPCCVPASYNPMVLIQKTDTGVSLQTYDDLLAKDCHCI

SEQ ID NO: 172 - protein, 338 aa, Artificial Sequence
  source: /note="Description of Artificial Sequence: Synthetic polypeptide"
APELLGGPSVFLFPPKPKDTLMISRTPEVTCVVVDVSHEDPEVKFNWYVDGVEVHNAKTKPREEQYNSTYRVVSVLTVLHQDWLNGKEYKCKVSNKALPAPIEKTISKAKGQPREPQVYTLPPSREEMTKNQVSLTCLVKGFYPSDIAVEWESNGQPENNYDTTPPVLDSDGSFFLYSDLTVDKSRWQQGNVFSCSVMHEALHNHYTQKSLSLSPGGGGGSGGGGSARDGDHCPLGPGRCCRLHTVRASLEDLGWADWVLSPREVQVTMCIGACPSQFRAANMHAQIKTSLHRLKPDTVPAPCCVPASYNPMVLIQKTDTGVSLQTYDDLLAKDCHCI

SEQ ID NO: 173 - protein, 333 aa, Artificial Sequence
  source: /note="Description of Artificial Sequence: Synthetic polypeptide"
APELLGGPSVFLFPPKPKDTLMISRTPEVTCVVVDVSHEDPEVKFNWYVDGVEVHNAKTKPREEQYNSTYRVVSVLTVLHQDWLNGKEYKCKVSNKALPAPIEKTISKAKGQPREPQVYTLPPSREEMTKNQVSLTCLVKGFYPSDIAVEWESNGQPENNYDTTPPVLDSDGSFFLYSDLTVDKSRWQQGNVFSCSVMHEALHNHYTQKSLSLSPGGGGGPARNGDHCPLGPGRCCRLHTVRASLEDLGWADWVLSPREVQVTMCIGACPSQFRAANMHAQIKTSLHRLKPDTVPAPCCVPASYNPMVLIQKTDTGVSLQTYDDLLAKDCHCI

SEQ ID NO: 174 - protein, 338 aa, Artificial Sequence
  source: /note="Description of Artificial Sequence: Synthetic polypeptide"
APELLGGPSVFLFPPKPKDTLMISRTPEVTCVVVDVSHEDPEVKFNWYVDGVEVHNAKTKPREEQYNSTYRVVSVLTVLHQDWLNGKEYKCKVSNKALPAPIEKTISKAKGQPREPQVYTLPPSREEMTKNQVSLTCLVKGFYPSDIAVEWESNGQPENNYDTTPPVLDSDGSFFLYSDLTVDKSRWQQGNVFSCSVMHEALHNHYTQKSLSLSPGGGGGPGGGGPARNGDHCPLGPGRCCRLHTVRASLEDLGWADWVLSPREVQVTMCIGACPSQFRAANMHAQIKTSLHRLKPDTVPAPCCVPASYNPMVLIQKTDTGVSLQTYDDLLAKDCHCI

SEQ ID NO: 175 - protein, 333 aa, Artificial Sequence
  source: /note="Description of Artificial Sequence: Synthetic polypeptide"
APELLGGPSVFLFPPKPKDTLMISRTPEVTCVVVDVSHEDPEVKFNWYVDGVEVHNAKTKPREEQYNSTYRVVSVLTVLHQDWLNGKEYKCKVSNKALPAPIEKTISKAKGQPREPQVYTLPPSREEMTKNQVSLTCLVKGFYPSDIAVEWESNGQPENNYDTTPPVLDSDGSFFLYSDLTVDKSRWQQGNVFSCSVMHEALHNHYTQKSLSLSPGGGGGQARNGDHCPLGPGRCCRLHTVRASLEDLGWADWVLSPREVQVTMCIGACPSQFRAANMHAQIKTSLHRLKPDTVPAPCCVPASYNPMVLIQKTDTGVSLQTYDDLLAKDCHCI

SEQ ID NO: 176 - protein, 338 aa, Artificial Sequence
  source: /note="Description of Artificial Sequence: Synthetic polypeptide"
APELLGGPSVFLFPPKPKDTLMISRTPEVTCVVVDVSHEDPEVKFNWYVDGVEVHNAKTKPREEQYNSTYRVVSVLTVLHQDWLNGKEYKCKVSNKALPAPIEKTISKAKGQPREPQVYTLPPSREEMTKNQVSLTCLVKGFYPSDIAVEWESNGQPENNYDTTPPVLDSDGSFFLYSDLTVDKSRWQQGNVFSCSVMHEALHNHYTQKSLSLSPGGGGGQGGGGQARNGDHCPLGPGRCCRLHTVRASLEDLGWADWVLSPREVQVTMCIGACPSQFRAANMHAQIKTSLHRLKPDTVPAPCCVPASYNPMVLIQKTDTGVSLQTYDDLLAKDCHCI

SEQ ID NO: 177 - protein, 338 aa, Artificial Sequence
  source: /note="Description of Artificial Sequence: Synthetic polypeptide"
APELLGGPSVFLFPPKPKDTLMISRTPEVTCVVVDVSHEDPEVKFNWYVDGVEVHNAKTKPREEQYNSTYRVVSVLTVLHQDWLNGKEYKCKVSNKALPAPIEKTISKAKGQPREPQVYTLPPSREEMTKNQVSLTCLVKGFYPSDIAVEWESNGQPENNYDTTPPVLDSDGSFFLYSDLTVDKSRWQQGNVFSCSVMHEALHNHYTQKSLSLSPGGGGGQGGGGQARDGDHCPLGPGRCCRLHTVRASLEDLGWADWVLSPREVQVTMCIGACPSQFRAANMHAQIKTSLHRLKPDTVPAPCCVPASYNPMVLIQKTDTGVSLQTYDDLLAKDCHCI

SEQ ID NO: 178 - protein, 335 aa, Artificial Sequence
  source: /note="Description of Artificial Sequence: Synthetic polypeptide"
APELLGGPSVFLFPPKPKDTLMISRTPEVTCVVVDVSHEDPEVKFNWYVDGVEVHNAKTKPREEQYNSTYRVVSVLTVLHQDWLNGKEYKCKVSNKALPAPIEKTISKAKGQPREPQVYTLPPSREEMTKNQVSLTCLVKGFYPSDIAVEWESNGQPENNYDTTPPVLDSDGSFFLYSDLTVDKSRWQQGNVFSCSVMHEALHNHYTQKSLSLSPGGGGGQGGGGQGDHCPLGPGRCCRLHTVRASLEDLGWADWVLSPREVQVTMCIGACPSQFRAANMHAQIKTSLHRLKPDTVPAPCCVPASYNPMVLIQKTDTGVSLQTYDDLLAKDCHCI

SEQ ID NO: 179 - protein, 217 aa, Artificial Sequence; identical to SEQ ID NO: 134
  source: /note="Description of Artificial Sequence: Synthetic polypeptide"

SEQ ID NO: 180 - protein, 328 aa, Artificial Sequence
  source: /note="Description of Artificial Sequence: Synthetic polypeptide"
APELLGGPSVFLFPPKPKDTLMISRTPEVTCVVVDVSHEDPEVKFNWYVDGVEVHNAKTKPREEQYNSTYRVVSVLTVLHQDWLNGKEYKCKVSNKALPAPIEKTISKAKGQPREPQVYTLPPCRKEMTKNQVSLTCLVKGFYPSDIAVEWESNGQPENNYKTTPPVLKSDGSFFLYSKLTVDKSRWQQGNVFSCSVMHEALHNHYTQKSLSLSPGARDGDHCPLGPGRCCRLHTVRASLEDLGWADWVLSPREVQVTMCIGACPSQFRAANMHAQIKTSLHRLKPDTVPAPCCVPASYNPMVLIQKTDTGVSLQTYDDLLAKDCHCI

SEQ ID NO: 181 - protein, 216 aa, Artificial Sequence
  source: /note="Description of Artificial Sequence: Synthetic polypeptide"
APELLGGPSVFLFPPKPKDTLMISRTPEVTCVVVDVSHEDPEVKFNWYVDGVEVHNAKTKPREEQYNSTYRVVSVLTVLHQDWLNGKEYKCKVSNKALPAPIEKTISKAKGQPREPQVYTLPPCRKEMTKNQVSLTCLVKGFYPSDIAVEWESNGQPENNYKTTPPVLKSDGSFFLYSKLTVDKSRWQQGNVFSCSVMHEALHNHYTQKSLSLSPG

SEQ ID NO: 182 - protein, 216 aa, Artificial Sequence
  source: /note="Description of Artificial Sequence: Synthetic polypeptide"
APELLGGPSVFLFPPKPKDTLMISRTPEVTCVVVDVSHEDPEVKFNWYVDGVEVHNAKTKPREEQYNSTYRVVSVLTVLHQDWLNGKEYKCKVSNKALPAPIEKTISKAKGQPREPQVCTLPPSREEMTKNQVSLTCLVKGFYPSDIAVEWESNGQPENNYDTTPPVLDSDGSFFLYSDLTVDKSRWQQGNVFSCSVMHEALHNHYTQKSLSLSPG

SEQ ID NO: 183 - protein, 217 aa, Artificial Sequence
  source: /note="Description of Artificial Sequence: Synthetic polypeptide"
APELLGGPSVFLFPPKPKDTLMISRTPEVTCVVVDVSHEDPEVKFNWYVDGVEVHNAKTKPREEQYNSTYRVVSVLTVLHQDWLNGKEYKCKVSNKALPAPIEKTISKAKGQPREPQVYTLPPCRKEMTKNQVSLTCLVKGFYPSDIAVEWESNGQPENNYKTTPPVLKSDGSFFLYSKLTVDKSRWQQGNVFSCSVMHEALHNHYTQKSLSLSPGK

SEQ ID NO: 184 - protein, 328 aa, Artificial Sequence
  source: /note="Description of Artificial Sequence: Synthetic polypeptide"
APELLGGPSVFLFPPKPKDTLMISRTPEVTCVVVDVSHEDPEVKFNWYVDGVEVHNAKTKPREEQYNSTYRVVSVLTVLHQDWLNGKEYKCKVSNKALPAPIEKTISKAKGQPREPQVCTLPPSREEMTKNQVSLTCLVKGFYPSDIAVEWESNGQPENNYDTTPPVLDSDGSFFLYSDLTVDKSRWQQGNVFSCSVMHEALHNHYTQKSLSLSPGARNGDHCPLGPGRCCRLHTVRASLEDLGWADWVLSPREVQVTMCIGACPSQFRAANMHAQIKTSLHRLKPDTVPAPCCVPASYNPMVLIQKTDTGVSLQTYDDLLAKDCHCI

SEQ ID NO: 185 - protein, 216 aa, Artificial Sequence; identical to SEQ ID NO: 182
  source: /note="Description of Artificial Sequence: Synthetic polypeptide"

SEQ ID NO: 186 - protein, 216 aa, Artificial Sequence; identical to SEQ ID NO: 181
  source: /note="Description of Artificial Sequence: Synthetic polypeptide"

SEQ ID NO: 187 - protein, 328 aa, Artificial Sequence
  source: /note="Description of Artificial Sequence: Synthetic polypeptide"
APELLGGPSVFLFPPKPKDTLMISRTPEVTCVVVDVSHEDPEVKFNWYVDGVEVHNAKTKPREEQYNSTYRVVSVLTVLHQDWLNGKEYKCKVSNKALPAPIEKTISKAKGQPREPQVCTLPPSREEMTKNQVSLTCLVKGFYPSDIAVEWESNGQPENNYDTTPPVLDSDGSFFLYSDLTVDKSRWQQGNVFSCSVMHEALHNHYTQKSLSLSPGARDGDHCPLGPGRCCRLHTVRASLEDLGWADWVLSPREVQVTMCIGACPSQFRAANMHAQIKTSLHRLKPDTVPAPCCVPASYNPMVLIQKTDTGVSLQTYDDLLAKDCHCI

SEQ ID NO: 188 - protein, 325 aa, Artificial Sequence
  source: /note="Description of Artificial Sequence: Synthetic polypeptide"
APELLGGPSVFLFPPKPKDTLMISRTPEVTCVVVDVSHEDPEVKFNWYVDGVEVHNAKTKPREEQYNSTYRVVSVLTVLHQDWLNGKEYKCKVSNKALPAPIEKTISKAKGQPREPQVCTLPPSREEMTKNQVSLTCLVKGFYPSDIAVEWESNGQPENNYDTTPPVLDSDGSFFLYSDLTVDKSRWQQGNVFSCSVMHEALHNHYTQKSLSLSPGGDHCPLGPGRCCRLHTVRASLEDLGWADWVLSPREVQVTMCIGACPSQFRAANMHAQIKTSLHRLKPDTVPAPCCVPASYNPMVLIQKTDTGVSLQTYDDLLAKDCHCI

SEQ ID NO: 189 - protein, 332 aa, Artificial Sequence
  source: /note="Description of Artificial Sequence: Synthetic polypeptide"
APELLGGPSVFLFPPKPKDTLMISRTPEVTCVVVDVSHEDPEVKFNWYVDGVEVHNAKTKPREEQYNSTYRVVSVLTVLHQDWLNGKEYKCKVSNKALPAPIEKTISKAKGQPREPQVCTLPPSREEMTKNQVSLTCLVKGFYPSDIAVEWESNGQPENNYDTTPPVLDSDGSFFLYSDLTVDKSRWQQGNVFSCSVMHEALHNHYTQKSLSLSPGGGGGARDGDHCPLGPGRCCRLHTVRASLEDLGWADWVLSPREVQVTMCIGACPSQFRAANMHAQIKTSLHRLKPDTVPAPCCVPASYNPMVLIQKTDTGVSLQTYDDLLAKDCHCI

SEQ ID NO: 190 - protein, 338 aa, Artificial Sequence
  source: /note="Description of Artificial Sequence: Synthetic polypeptide"
APELLGGPSVFLFPPKPKDTLMISRTPEVTCVVVDVSHEDPEVKFNWYVDGVEVHNAKTKPREEQYNSTYRVVSVLTVLHQDWLNGKEYKCKVSNKALPAPIEKTISKAKGQPREPQVCTLPPSREEMTKNQVSLTCLVKGFYPSDIAVEWESNGQPENNYDTTPPVLDSDGSFFLYSDLTVDKSRWQQGNVFSCSVMHEALHNHYTQKSLSLSPGGGGGSGGGGSARDGDHCPLGPGRCCRLHTVRASLEDLGWADWVLSPREVQVTMCIGACPSQFRAANMHAQIKTSLHRLKPDTVPAPCCVPASYNPMVLIQKTDTGVSLQTYDDLLAKDCHCI

SEQ ID NO: 191 - protein, 338 aa, Artificial Sequence
  source: /note="Description of Artificial Sequence: Synthetic polypeptide"
APELLGGPSVFLFPPKPKDTLMISRTPEVTCVVVDVSHEDPEVKFNWYVDGVEVHNAKTKPREEQYNSTYRVVSVLTVLHQDWLNGKEYKCKVSNKALPAPIEKTISKAKGQPREPQVCTLPPSREEMTKNQVSLTCLVKGFYPSDIAVEWESNGQPENNYDTTPPVLDSDGSFFLYSDLTVDKSRWQQGNVFSCSVMHEALHNHYTQKSLSLSPGGGGGQGGGGQARDGDHCPLGPGRCCRLHTVRASLEDLGWADWVLSPREVQVTMCIGACPSQFRAANMHAQIKTSLHRLKPDTVPAPCCVPASYNPMVLIQKTDTGVSLQTYDDLLAKDCHCI

SEQ ID NO: 192 - protein, 217 aa, Artificial Sequence
  source: /note="Description of Artificial Sequence: Synthetic polypeptide"
APELLGGPSVFLFPPKPKDTLMISRTPEVTCVVVDVSHEDPEVKFNWYVDGVEVHNAKTKPREEQYNSTYRVVSVLTVLHQDWLNGKEYKCKVSNKALPAPIEKTISKAKGQPREPQVYTCPPSRKEMTKNQVSLTCLVKGFYPSDIAVEWESNGQPENNYKTTPPVLKSDGSFFLYSKLTVDKSRWQQGNVFSCSVMHEALHNHYTQKSLSLSPGK

SEQ ID NO: 193 - protein, 338 aa, Artificial Sequence
  source: /note="Description of Artificial Sequence: Synthetic polypeptide"
APELLGGPSVFLFPPKPKDTLMISRTPEVTCVVVDVSHEDPEVKFNWYVDGVEVHNAKTKPREEQYNSTYRVVSVLTVLHQDWLNGKEYKCKVSNKALPAPIEKTISKAKGQPREPQVYTCPPSREEMTKNQVSLTCLVKGFYPSDIAVEWESNGQPENNYDTTPPVLDSDGSFFLYSDLTVDKSRWQQGNVFSCSVMHEALHNHYTQKSLSLSPGGGGGSGGGGSARNGDHCPLGPGRCCRLHTVRASLEDLGWADWVLSPREVQVTMCIGACPSQFRAANMHAQIKTSLHRLKPDTVPAPCCVPASYNPMVLIQKTDTGVSLQTYDDLLAKDCHCI

SEQ ID NO: 194 - protein, 216 aa, Artificial Sequence
  source: /note="Description of Artificial Sequence: Synthetic polypeptide"
APELLGGPSVFLFPPKPKDTLMISRTPEVTCVVVDVSHEDPEVKFNWYVDGVEVHNAKTKPREEQYNSTYRVVSVLTVLHQDWLNGKEYKCKVSNKALPAPIEKTISKAKGQPREPQVYTCPPSREEMTKNQVSLTCLVKGFYPSDIAVEWESNGQPENNYDTTPPVLDSDGSFFLYSDLTVDKSRWQQGNVFSCSVMHEALHNHYTQKSLSLSPG

SEQ ID NO: 195 - protein, 216 aa, Artificial Sequence
  source: /note="Description of Artificial Sequence: Synthetic polypeptide"
APELLGGPSVFLFPPKPKDTLMISRTPEVTCVVVDVSHEDPEVKFNWYVDGVEVHNAKTKPREEQYNSTYRVVSVLTVLHQDWLNGKEYKCKVSNKALPAPIEKTISKAKGQPREPQVYTCPPSRKEMTKNQVSLTCLVKGFYPSDIAVEWESNGQPENNYKTTPPVLKSDGSFFLYSKLTVDKSRWQQGNVFSCSVMHEALHNHYTQKSLSLSPG

SEQ ID NO: 196 - protein, 717 aa, Artificial Sequence
  source: /note="Description of Artificial Sequence: Synthetic polypeptide"
DAHKSEVAHRFKDLGEENFKALVLIAFAQYLQQCPFEDHVKLVNEVTEFAKTCVADESAENCDKSLHTLFGDKLCTVATLRETYGEMADCCAKQEPERNECFLQHKDDNPNLPRLVRPEVDVMCTAFHDNEETFLKKYLYEIARRHPYFYAPELLFFAKRYKAAFTECCQAADKAACLLPKLDELRDEGKASSAKQRLKCASLQKFGERAFKAWAVARLSQRFPKAEFAEVSKLVTDLTKVHTECCHGDLLECADDRADLAKYICENQDSISSKLKECCEKPLLEKSHCIAEVENDEMPADLPSLAADFVESKDVCKNYAEAKDVFLGMFLYEYARRHPDYSVVLLLRLAKTYETTLEKCCAAADPHECYAKVFDEFKPLVEEPQNLIKQNCELFEQLGEYKFQNALLVRYTKKVPQVSTPTLVEVSRNLGKVGSKCCKHPEAKRMPCAEDYLSVVLNQLCVLHEKTPVSDRVTKCCTESLVNRRPCFSALEVDETYVPKEFNAETFTFHADICTLSEKERQIKKQTALVELVKHKPKATKEQLKAVMDDFAAFVEKCCKADDKETCFAEEGKKLVAASQAALGLGGGGSGGGGSGGGGSGGGGSARNGDHCPLGPGRCCRLHTVRASLEDLGWADWVLSPREVQVTMCIGACPSQFRAANMHAQIKTSLHRLKPDTVPAPCCVPASYNPMVLIQKTDTGVSLQTYDDLLAKDCHCI

SEQ ID NO: 197 - protein, 706 aa, Artificial Sequence
  source: /note="Description of Artificial Sequence: Synthetic polypeptide"
DAHKSEVAHRFKDLGEENFKALVLIAFAQYLQQCPFEDHVKLVNEVTEFAKTCVADESAENCDKSLHTLFGDKLCTVATLRETYGEMADCCAKQEPERNECFLQHKDDNPNLPRLVRPEVDVMCTAFHDNEETFLKKYLYEIARRHPYFYAPELLFFAKRYKAAFTECCQAADKAACLLPKLDELRDEGKASSAKQRLKCASLQKFGERAFKAWAVARLSQRFPKAEFAEVSKLVTDLTKVHTECCHGDLLECADDRADLAKYICENQDSISSKLKECCEKPLLEKSHCIAEVENDEMPADLPSLAADFVESKDVCKNYAEAKDVFLGMFLYEYARRHPDYSVVLLLRLAKTYETTLEKCCAAADPHECYAKVFDEFKPLVEEPQNLIKQNCELFEQLGEYKFQNALLVRYTKKVPQVSTPTLVEVSRNLGKVGSKCCKHPEAKRMPCAEDYLSVVLNQLCVLHEKTPVSDRVTKCCTESLVNRRPCFSALEVDETYVPKEFNAETFTFHADICTLSEKERQIKKQTALVELVKHKPKATKEQLKAVMDDFAAFVEKCCKADDKETCFAEEGKKLVAASQAALGLGSPAPAPGSARNGDHCPLGPGRCCRLHTVRASLEDLGWADWVLSPREVQVTMCIGACPSQFRAANMHAQIKTSLHRLKPDTVPAPCCVPASYNPMVLIQKTDTGVSLQTYDDLLAKDCHCI

SEQ ID NO: 198 - protein, 711 aa, Artificial Sequence
  source: /note="Description of Artificial Sequence: Synthetic polypeptide"
DAHKSEVAHRFKDLGEENFKALVLIAFAQYLQQCPFEDHVKLVNEVTEFAKTCVADESAENCDKSLHTLFGDKLCTVATLRETYGEMADCCAKQEPERNECFLQHKDDNPNLPRLVRPEVDVMCTAFHDNEETFLKKYLYEIARRHPYFYAPELLFFAKRYKAAFTECCQAADKAACLLPKLDELRDEGKASSAKQRLKCASLQKFGERAFKAWAVARLSQRFPKAEFAEVSKLVTDLTKVHTECCHGDLLECADDRADLAKYICENQDSISSKLKECCEKPLLEKSHCIAEVENDEMPADLPSLAADFVESKDVCKNYAEAKDVFLGMFLYEYARRHPDYSVVLLLRLAKTYETTLEKCCAAADPHECYAKVFDEFKPLVEEPQNLIKQNCELFEQLGEYKFQNALLVRYTKKVPQVSTPTLVEVSRNLGKVGSKCCKHPEAKRMPCAEDYLSVVLNQLCVLHEKTPVSDRVTKCCTESLVNRRPCFSALEVDETYVPKEFNAETFTFHADICTLSEKERQIKKQTALVELVKHKPKATKEQLKAVMDDFAAFVEKCCKADDKETCFAEEGKKLVAASQAALGLGSPAPAPPAPAPGSARNGDHCPLGPGRCCRLHTVRASLEDLGWADWVLSPREVQVTMCIGACPSQFRAANMHAQIKTSLHRLKPDTVPAPCCVPASYNPMVLIQKTDTGVSLQTYDDLLAKDCHCI

SEQ ID NO: 199 - protein, 708 aa, Artificial Sequence
  source: /note="Description of Artificial Sequence: Synthetic polypeptide"
DAHKSEVAHRFKDLGEENFKALVLIAFAQYLQQCPFEDHVKLVNEVTEFAKTCVADESAENCDKSLHTLFGDKLCTVATLRETYGEMADCCAKQEPERNECFLQHKDDNPNLPRLVRPEVDVMCTAFHDNEETFLKKYLYEIARRHPYFYAPELLFFAKRYKAAFTECCQAADKAACLLPKLDELRDEGKASSAKQRLKCASLQKFGERAFKAWAVARLSQRFPKAEFAEVSKLVTDLTKVHTECCHGDLLECADDRADLAKYICENQDSISSKLKECCEKPLLEKSHCIAEVENDEMPADLPSLAADFVESKDVCKNYAEAKDVFLGMFLYEYARRHPDYSVVLLLRLAKTYETTLEKCCAAADPHECYAKVFDEFKPLVEEPQNLIKQNCELFEQLGEYKFQNALLVRYTKKVPQVSTPTLVEVSRNLGKVGSKCCKHPEAKRMPCAEDYLSVVLNQLCVLHEKTPVSDRVTKCCTESLVNRRPCFSALEVDETYVPKEFNAETFTFHADICTLSEKERQIKKQTALVELVKHKPKATKEQLKAVMDDFAAFVEKCCKADDKETCFAEEGKKLVAASQAALGLGSAAQAAQQGSARNGDHCPLGPGRCCRLHTVRASLEDLGWADWVLSPREVQVTMCIGACPSQFRAANMHAQIKTSLHRLKPDTVPAPCCVPASYNPMVLIQKTDTGVSLQTYDDLLAKDCHCI

SEQ ID NO: 200 - protein, 715 aa, Artificial Sequence
  source: /note="Description of Artificial Sequence: Synthetic polypeptide"
DAHKSEVAHRFKDLGEENFKALVLIAFAQYLQQCPFEDHVKLVNEVTEFAKTCVADESAENCDKSLHTLFGDKLCTVATLRETYGEMADCCAKQEPERNECFLQHKDDNPNLPRLVRPEVDVMCTAFHDNEETFLKKYLYEIARRHPYFYAPELLFFAKRYKAAFTECCQAADKAACLLPKLDELRDEGKASSAKQRLKCASLQKFGERAFKAWAVARLSQRFPKAEFAEVSKLVTDLTKVHTECCHGDLLECADDRADLAKYICENQDSISSKLKECCEKPLLEKSHCIAEVENDEMPADLPSLAADFVESKDVCKNYAEAKDVFLGMFLYEYARRHPDYSVVLLLRLAKTYETTLEKCCAAADPHECYAKVFDEFKPLVEEPQNLIKQNCELFEQLGEYKFQNALLVRYTKKVPQVSTPTLVEVSRNLGKVGSKCCKHPEAKRMPCAEDYLSVVLNQLCVLHEKTPVSDRVTKCCTESLVNRRPCFSALEVDETYVPKEFNAETFTFHADICTLSEKERQIKKQTALVELVKHKPKATKEQLKAVMDDFAAFVEKCCKADDKETCFAEEGKKLVAASQAALGLGSAAQAAQQAAQAAQQGSARNGDHCPLGPGRCCRLHTVRASLEDLGWADWVLSPREVQVTMCIGACPSQFRAANMHAQIKTSLHRLKPDTVPAPCCVPASYNPMVLIQKTDTGVSLQTYDDLLAKDCHCI

SEQ ID NO: 201 - protein, 724 aa, Artificial Sequence
  source: /note="Description of Artificial Sequence: Synthetic polypeptide"
DAHKSEVAHRFKDLGEENFKALVLIAFAQYLQQCPFEDHVKLVNEVTEFAKTCVADESAENCDKSLHTLFGDKLCTVATLRETYGEMADCCAKQEPERNECFLQHKDDNPNLPRLVRPEVDVMCTAFHDNEETFLKKYLYEIARRHPYFYAPELLFFAKRYKAAFTECCQAADKAACLLPKLDELRDEGKASSAKQRLKCASLQKFGERAFKAWAVARLSQRFPKAEFAEVSKLVTDLTKVHTECCHGDLLECADDRADLAKYICENQDSISSKLKECCEKPLLEKSHCIAEVENDEMPADLPSLAADFVESKDVCKNYAEAKDVFLGMFLYEYARRHPDYSVVLLLRLAKTYETTLEKCCAAADPHECYAKVFDEFKPLVEEPQNLIKQNCELFEQLGEYKFQNALLVRYTKKVPQVSTPTLVEVSRNLGKVGSKCCKHPEAKRMPCAEDYLSVVLNQLCVLHEKTPVSDRVTKCCTESLVNRRPCFSALEVDETYVPKEFNAETFTFHADICTLSEKERQIKKQTALVELVKHKPKATKEQLKAVMDDFAAFVEKCCKADDKETCFAEEGKKLVAASQAALGLGGNAEAAAKEAAAKEAAAKEAAAKAGGARNGDHCPLGPGRCCRLHTVRASLEDLGWADWVLSPREVQVTMCIGACPSQFRAANMHAQIKTSLHRLKPDTVPAPCCVPASYNPMVLIQKTDTGVSLQTYDDLLAKDCHCI

SEQ ID NO: 202 - protein, 777 aa, Artificial Sequence [sequence omitted]

SEQ ID NO: 203 - protein, 715 aa, Artificial Sequence
  source: /note="Description of Artificial Sequence: Synthetic polypeptide"
DAHKSEVAHRFKDLGEENFKALVLIAFAQYLQQCPFEDHVKLVNEVTEFAKTCVADESAENCDKSLHTLFGDKLCTVATLRETYGEMADCCAKQEPERNECFLQHKDDNPNLPRLVRPEVDVMCTAFHDNEETFLKKYLYEIARRHPYFYAPELLFFAKRYKAAFTECCQAADKAACLLPKLDELRDEGKASSAKQRLKCASLQKFGERAFKAWAVARLSQRFPKAEFAEVSKLVTDLTKVHTECCHGDLLECADDRADLAKYICENQDSISSKLKECCEKPLLEKSHCIAEVENDEMPADLPSLAADFVESKDVCKNYAEAKDVFLGMFLYEYARRHPDYSVVLLLRLAKTYETTLEKCCAAADPHECYAKVFDEFKPLVEEPQNLIKQNCELFEQLGEYKFQNALLVRYTKKVPQVSTPTLVEVSRNLGKVGSKCCKHPEAKRMPCAEDYLSVVLNQLCVLHEKTPVSDRVTKCCTESLVNRRPCFSALEVDETYVPKEFNAETFTFHADICTLSEKERQIKKQTALVELVKHKPKATKEQLKAVMDDFAAFVEKCCKADDKETCFAEEGKKLVAASQAALGLGSAAQAAQQAAQAAQQGSARDGDHCPLGPGRCCRLHTVRASLEDLGWADWVLSPREVQVTMCIGACPSQFRAANMHAQIKTSLHRLKPDTVPAPCCVPASYNPMVLIQKTDTGVSLQTYDDLLAKDCHCI

SEQ ID NO: 204 - protein, 217 aa, Artificial Sequence
  source: /note="Description of Artificial Sequence: Synthetic polypeptide"
APELLGGPSVFLFPPKPKDTLMISRTPEVTCVVVDVSHEDPEVKFNWYVDGVEVHNAKTKPREEQYGSTYRVVSVLTVLHQDWLNGKEYKCKVSNKALPAPIEKTISKAKGQPREPQVYTLPPSRKEMTKNQVSLTCLVKGFYPSDIAVEWESNGQPENNYKTTPPVLKSDGSFFLYSKLTVDKSRWQQGNVFSCSVMHEALHNHYTQKSLSLSPGK

SEQ ID NO: 205 - protein, 325 aa, Artificial Sequence
  source: /note="Description of Artificial Sequence: Synthetic polypeptide"
APELLGGPSVFLFPPKPKDTLMISRTPEVTCVVVDVSHEDPEVKFNWYVDGVEVHNAKTKPREEQYGSTYRVVSVLTVLHQDWLNGKEYKCKVSNKALPAPIEKTISKAKGQPREPQVYTLPPSREEMTKNQVSLTCLVKGFYPSDIAVEWESNGQPENNYDTTPPVLDSDGSFFLYSDLTVDKSRWQQGNVFSCSVMHEALHNHYTQKSLSLSPGGDHCPLGPGRCCRLHTVRASLEDLGWADWVLSPREVQVTMCIGACPSQFRAANMHAQIKTSLHRLKPDTVPAPCCVPASYNPMVLIQKTDTGVSLQTYDDLLAKDCHCI

SEQ ID NO: 206 - protein, 216 aa, Artificial Sequence
  source: /note="Description of Artificial Sequence: Synthetic polypeptide"
APELLGGPSVFLFPPKPKDTLMISRTPEVTCVVVDVSHEDPEVKFNWYVDGVEVHNAKTKPREEQYGSTYRVVSVLTVLHQDWLNGKEYKCKVSNKALPAPIEKTISKAKGQPREPQVYTLPPSREEMTKNQVSLTCLVKGFYPSDIAVEWESNGQPENNYDTTPPVLDSDGSFFLYSDLTVDKSRWQQGNVFSCSVMHEALHNHYTQKSLSLSPG

SEQ ID NO: 207 - protein, 216 aa, Artificial Sequence
  source: /note="Description of Artificial Sequence: Synthetic polypeptide"
APELLGGPSVFLFPPKPKDTLMISRTPEVTCVVVDVSHEDPEVKFNWYVDGVEVHNAKTKPREEQYGSTYRVVSVLTVLHQDWLNGKEYKCKVSNKALPAPIEKTISKAKGQPREPQVYTLPPSRKEMTKNQVSLTCLVKGFYPSDIAVEWESNGQPENNYKTTPPVLKSDGSFFLYSKLTVDKSRWQQGNVFSCSVMHEALHNHYTQKSLSLSPG

SEQ ID NO: 208 - protein, 328 aa, Artificial Sequence
  source: /note="Description of Artificial Sequence: Synthetic polypeptide"
APELLGGPSVFLFPPKPKDTLMISRTPEVTCVVVDVSHEDPEVKFNWYVDGVEVHNAKTKPREEQYGSTYRVVSVLTVLHQDWLNGKEYKCKVSNKALPAPIEKTISKAKGQPREPQVYTLPPSREEMTKNQVSLTCLVKGFYPSDIAVEWESNGQPENNYDTTPPVLDSDGSFFLYSDLTVDKSRWQQGNVFSCSVMHEALHNHYTQKSLSLSPGARDGDHCPLGPGRCCRLHTVRASLEDLGWADWVLSPREVQVTMCIGACPSQFRAANMHAQIKTSLHRLKPDTVPAPCCVPASYNPMVLIQKTDTGVSLQTYDDLLAKDCHCI

SEQ ID NO: 209 - protein, 332 aa, Artificial Sequence
  source: /note="Description of Artificial Sequence: Synthetic polypeptide"
APELLGGPSVFLFPPKPKDTLMISRTPEVTCVVVDVSHEDPEVKFNWYVDGVEVHNAKTKPREEQYGSTYRVVSVLTVLHQDWLNGKEYKCKVSNKALPAPIEKTISKAKGQPREPQVYTLPPSREEMTKNQVSLTCLVKGFYPSDIAVEWESNGQPENNYDTTPPVLDSDGSFFLYSDLTVDKSRWQQGNVFSCSVMHEALHNHYTQKSLSLSPGGGGGARDGDHCPLGPGRCCRLHTVRASLEDLGWADWVLSPREVQVTMCIGACPSQFRAANMHAQIKTSLHRLKPDTVPAPCCVPASYNPMVLIQKTDTGVSLQTYDDLLAKDCHCI

SEQ ID NO: 210 - protein, 217 aa, Artificial Sequence
  source: /note="Description of Artificial Sequence: Synthetic polypeptide"
APELLGGPSVFLFPPKPKDTLMISRTPEVTCVVVDVSHEDPEVKFNWYVDGVEVHNAKTKPREEQYGSTYRVVSVLTVLHQDWLNGKEYKCKVSNKALPAPIEKTISKAKGQPREPQVYTLPPCRKEMTKNQVSLTCLVKGFYPSDIAVEWESNGQPENNYKTTPPVLKSDGSFFLYSKLTVDKSRWQQGNVFSCSVMHEALHNHYTQKSLSLSPGK

SEQ ID NO: 211 - protein, 325 aa, Artificial Sequence
  source: /note="Description of Artificial Sequence: Synthetic polypeptide"
APELLGGPSVFLFPPKPKDTLMISRTPEVTCVVVDVSHEDPEVKFNWYVDGVEVHNAKTKPREEQYGSTYRVVSVLTVLHQDWLNGKEYKCKVSNKALPAPIEKTISKAKGQPREPQVCTLPPSREEMTKNQVSLTCLVKGFYPSDIAVEWESNGQPENNYDTTPPVLDSDGSFFLYSDLTVDKSRWQQGNVFSCSVMHEALHNHYTQKSLSLSPGGDHCPLGPGRCCRLHTVRASLEDLGWADWVLSPREVQVTMCIGACPSQFRAANMHAQIKTSLHRLKPDTVPAPCCVPASYNPMVLIQKTDTGVSLQTYDDLLAKDCHCI

SEQ ID NO: 212 - protein, 216 aa, Artificial Sequence
  source: /note="Description of Artificial Sequence: Synthetic polypeptide"
APELLGGPSVFLFPPKPKDTLMISRTPEVTCVVVDVSHEDPEVKFNWYVDGVEVHNAKTKPREEQYGSTYRVVSVLTVLHQDWLNGKEYKCKVSNKALPAPIEKTISKAKGQPREPQVCTLPPSREEMTKNQVSLTCLVKGFYPSDIAVEWESNGQPENNYDTTPPVLDSDGSFFLYSDLTVDKSRWQQGNVFSCSVMHEALHNHYTQKSLSLSPG

SEQ ID NO: 213 - protein, 216 aa, Artificial Sequence
  source: /note="Description of Artificial Sequence: Synthetic polypeptide"
APELLGGPSVFLFPPKPKDTLMISRTPEVTCVVVDVSHEDPEVKFNWYVDGVEVHNAKTKPREEQYGSTYRVVSVLTVLHQDWLNGKEYKCKVSNKALPAPIEKTISKAKGQPREPQVYTLPPCRKEMTKNQVSLTCLVKGFYPSDIAVEWESNGQPENNYKTTPPVLKSDGSFFLYSKLTVDKSRWQQGNVFSCSVMHEALHNHYTQKSLSLSPG

SEQ ID NO: 214 - protein, 328 aa, Artificial Sequence
  source: /note="Description of Artificial Sequence: Synthetic polypeptide"
APELLGGPSVFLFPPKPKDTLMISRTPEVTCVVVDVSHEDPEVKFNWYVDGVEVHNAKTKPREEQYGSTYRVVSVLTVLHQDWLNGKEYKCKVSNKALPAPIEKTISKAKGQPREPQVCTLPPSREEMTKNQVSLTCLVKGFYPSDIAVEWESNGQPENNYDTTPPVLDSDGSFFLYSDLTVDKSRWQQGNVFSCSVMHEALHNHYTQKSLSLSPGARDGDHCPLGPGRCCRLHTVRASLEDLGWADWVLSPREVQVTMCIGACPSQFRAANMHAQIKTSLHRLKPDTVPAPCCVPASYNPMVLIQKTDTGVSLQTYDDLLAKDCHCI

SEQ ID NO: 215 - protein, 217 aa, Artificial Sequence
  source: /note="Description of Artificial Sequence: Synthetic polypeptide"
APELLGGPSVFLFPPKPKDTLMISRTPEVTCVVVDVSHEDPEVKFNWYVDGVEVHNAKTKPREEQYGSTYRVVSVLTVLHQDWLNGKEYKCKVSNKALPAPIEKTISKAKGQPREPQVYTCPPSREEMTKNQVSLTCLVKGFYPSDIAVEWESNGQPENNYKTTPPVLKSDGSFFLYSKLTVDKSRWQQGNVFSCSVMHEALHNHYTQKSLSLSPGK

SEQ ID NO: 216 - protein, 328 aa, Artificial Sequence
  source: /note="Description of Artificial Sequence: Synthetic polypeptide"
APELLGGPSVFLFPPKPKDTLMISRTPEVTCVVVDVSHEDPEVKFNWYVDGVEVHNAKTKPREEQYGSTYRVVSVLTVLHQDWLNGKEYKCKVSNKALPAPIEKTISKAKGQPREPQVYTCPPSRKEMTKNQVSLTCLVKGFYPSDIAVEWESNGQPENNYKTTPPVLKSDGSFFLYSKLTVDKSRWQQGNVFSCSVMHEALHNHYTQKSLSLSPGARNGDHCPLGPGRCCRLHTVRASLEDLGWADWVLSPREVQVTMCIGACPSQFRAANMHAQIKTSLHRLKPDTVPAPCCVPASYNPMVLIQKTDTGVSLQTYDDLLAKDCHCI

SEQ ID NO: 217 - protein, 216 aa, Artificial Sequence
  source: /note="Description of Artificial Sequence: Synthetic polypeptide"
APELLGGPSVFLFPPKPKDTLMISRTPEVTCVVVDVSHEDPEVKFNWYVDGVEVHNAKTKPREEQYGSTYRVVSVLTVLHQDWLNGKEYKCKVSNKALPAPIEKTISKAKGQPREPQVYTCPPSREEMTKNQVSLTCLVKGFYPSDIAVEWESNGQPENNYDTTPPVLDSDGSFFLYSDLTVDKSRWQQGNVFSCSVMHEALHNHYTQKSLSLSPG

SEQ ID NO: 218 - protein, 216 aa, Artificial Sequence
  source: /note="Description of Artificial Sequence: Synthetic polypeptide"
APELLGGPSVFLFPPKPKDTLMISRTPEVTCVVVDVSHEDPEVKFNWYVDGVEVHNAKTKPREEQYGSTYRVVSVLTVLHQDWLNGKEYKCKVSNKALPAPIEKTISKAKGQPREPQVYTCPPSREEMTKNQVSLTCLVKGFYPSDIAVEWESNGQPENNYKTTPPVLKSDGSFFLYSKLTVDKSRWQQGNVFSCSVMHEALHNHYTQKSLSLSPG

SEQ ID NO: 219 - protein, 328 aa, Artificial Sequence
  source: /note="Description of Artificial Sequence: Synthetic polypeptide"
APELLGGPSVFLFPPKPKDTLMISRTPEVTCVVVDVSHEDPEVKFNWYVDGVEVHNAKTKPREEQYGSTYRVVSVLTVLHQDWLNGKEYKCKVSNKALPAPIEKTISKAKGQPREPQVYTCPPSRKEMTKNQVSLTCLVKGFYPSDIAVEWESNGQPENNYKTTPPVLKSDGSFFLYSKLTVDKSRWQQGNVFSCSVMHEALHNHYTQKSLSLSPGARDGDHCPLGPGRCCRLHTVRASLEDLGWADWVLSPREVQVTMCIGACPSQFRAANMHAQIKTSLHRLKPDTVPAPCCVPASYNPMVLIQKTDTGVSLQTYDDLLAKDCHCI

SEQ ID NO: 220 - protein, 217 aa, Artificial Sequence
  source: /note="Description of Artificial Sequence: Synthetic polypeptide"
APELLGGPSVFLFPPKPKDTLMISRTPEVTCVVVDVSHEDPEVKFNWYVDGVEVHNCKTKPREEQYGSTYRVVSVCTVLHQDWLNGKEYKCKVSNKALPAPIEKTISKAKGQPREPQVYTLPPSRKEMTKNQVSLTCLVKGFYPSDIAVEWESNGQPENNYKTTPPVLKSDGSFFLYSKLTVDKSRWQQGNVFSCSVMHEALHNHYTQKSLSLSPGK

SEQ ID NO: 221 - protein, 325 aa, Artificial Sequence
  source: /note="Description of Artificial Sequence: Synthetic polypeptide"
APELLGGPSVFLFPPKPKDTLMISRTPEVTCVVVDVSHEDPEVKFNWYVDGVEVHNCKTKPREEQYGSTYRVVSVCTVLHQDWLNGKEYKCKVSNKALPAPIEKTISKAKGQPREPQVYTLPPSREEMTKNQVSLTCLVKGFYPSDIAVEWESNGQPENNYDTTPPVLDSDGSFFLYSDLTVDKSRWQQGNVFSCSVMHEALHNHYTQKSLSLSPGGDHCPLGPGRCCRLHTVRASLEDLGWADWVLSPREVQVTMCIGACPSQFRAANMHAQIKTSLHRLKPDTVPAPCCVPASYNPMVLIQKTDTGVSLQTYDDLLAKDCHCI

SEQ ID NO: 222 - protein, 216 aa, Artificial Sequence
  source: /note="Description of Artificial Sequence: Synthetic polypeptide"
APELLGGPSVFLFPPKPKDTLMISRTPEVTCVVVDVSHEDPEVKFNWYVDGVEVHNCKTKPREEQYGSTYRVVSVCTVLHQDWLNGKEYKCKVSNKALPAPIEKTISKAKGQPREPQVYTLPPSREEMTKNQVSLTCLVKGFYPSDIAVEWESNGQPENNYDTTPPVLDSDGSFFLYSDLTVDKSRWQQGNVFSCSVMHEALHNHYTQKSLSLSPG

SEQ ID NO: 223 - protein, 216 aa, Artificial Sequence
  source: /note="Description of Artificial Sequence: Synthetic polypeptide"
APELLGGPSVFLFPPKPKDTLMISRTPEVTCVVVDVSHEDPEVKFNWYVDGVEVHNCKTKPREEQYGSTYRVVSVCTVLHQDWLNGKEYKCKVSNKALPAPIEKTISKAKGQPREPQVYTLPPSRKEMTKNQVSLTCLVKGFYPSDIAVEWESNGQPENNYKTTPPVLKSDGSFFLYSKLTVDKSRWQQGNVFSCSVMHEALHNHYTQKSLSLSPG

SEQ ID NO: 224 - protein, 328 aa, Artificial Sequence
  source: /note="Description of Artificial Sequence: Synthetic polypeptide"
APELLGGPSVFLFPPKPKDTLMISRTPEVTCVVVDVSHEDPEVKFNWYVDGVEVHNCKTKPREEQYGSTYRVVSVCTVLHQDWLNGKEYKCKVSNKALPAPIEKTISKAKGQPREPQVYTLPPSREEMTKNQVSLTCLVKGFYPSDIAVEWESNGQPENNYDTTPPVLDSDGSFFLYSDLTVDKSRWQQGNVFSCSVMHEALHNHYTQKSLSLSPGARDGDHCPLGPGRCCRLHTVRASLEDLGWADWVLSPREVQVTMCIGACPSQFRAANMHAQIKTSLHRLKPDTVPAPCCVPASYNPMVLIQKTDTGVSLQTYDDLLAKDCHCI

SEQ ID NO: 225 - protein, 217 aa, Artificial Sequence
  source: /note="Description of Artificial Sequence: Synthetic polypeptide"
APELLGGPSVFLFPPKPKDTLMISRTPEVTCVVVDVSHEDPEVKFNWYVDGVEVHNCKTKPREEQYGSTYRVVSVCTVLHQDWLNGKEYKCKVSNKALPAPIEKTISKAKGQPREPQVYTLPPCRKEMTKNQVSLTCLVKGFYPSDIAVEWESNGQPENNYKTTPPVLKSDGSFFLYSKLTVDKSRWQQGNVFSCSVMHEALHNHYTQKSLSLSPGK

SEQ ID NO: 226 - protein, 325 aa, Artificial Sequence
  source: /note="Description of Artificial Sequence: Synthetic polypeptide"
APELLGGPSVFLFPPKPKDTLMISRTPEVTCVVVDVSHEDPEVKFNWYVDGVEVHNCKTKPREEQYGSTYRVVSVCTVLHQDWLNGKEYKCKVSNKALPAPIEKTISKAKGQPREPQVCTLPPSREEMTKNQVSLTCLVKGFYPSDIAVEWESNGQPENNYDTTPPVLDSDGSFFLYSDLTVDKSRWQQGNVFSCSVMHEALHNHYTQKSLSLSPGGDHCPLGPGRCCRLHTVRASLEDLGWADWVLSPREVQVTMCIGACPSQFRAANMHAQIKTSLHRLKPDTVPAPCCVPASYNPMVLIQKTDTGVSLQTYDDLLAKDCHCI

SEQ ID NO: 227 - protein, 216 aa, Artificial Sequence
  source: /note="Description of Artificial Sequence: Synthetic polypeptide"
APELLGGPSVFLFPPKPKDTLMISRTPEVTCVVVDVSHEDPEVKFNWYVDGVEVHNCKTKPREEQYGSTYRVVSVCTVLHQDWLNGKEYKCKVSNKALPAPIEKTISKAKGQPREPQVCTLPPSREEMTKNQVSLTCLVKGFYPSDIAVEWESNGQPENNYDTTPPVLDSDGSFFLYSDLTVDKSRWQQGNVFSCSVMHEALHNHYTQKSLSLSPG

SEQ ID NO: 228 - protein, 216 aa, Artificial Sequence
  source: /note="Description of Artificial Sequence: Synthetic polypeptide"
APELLGGPSVFLFPPKPKDTLMISRTPEVTCVVVDVSHEDPEVKFNWYVDGVEVHNCKTKPREEQYGSTYRVVSVCTVLHQDWLNGKEYKCKVSNKALPAPIEKTISKAKGQPREPQVYTLPPCRKEMTKNQVSLTCLVKGFYPSDIAVEWESNGQPENNYKTTPPVLKSDGSFFLYSKLTVDKSRWQQGNVFSCSVMHEALHNHYTQKSLSLSPG

SEQ ID NO: 229 - protein, 328 aa, Artificial Sequence
  source: /note="Description of Artificial Sequence: Synthetic polypeptide"
APELLGGPSVFLFPPKPKDTLMISRTPEVTCVVVDVSHEDPEVKFNWYVDGVEVHNCKTKPREEQYGSTYRVVSVCTVLHQDWLNGKEYKCKVSNKALPAPIEKTISKAKGQPREPQVCTLPPSREEMTKNQVSLTCLVKGFYPSDIAVEWESNGQPENNYDTTPPVLDSDGSFFLYSDLTVDKSRWQQGNVFSCSVMHEALHNHYTQKSLSLSPGARDGDHCPLGPGRCCRLHTVRASLEDLGWADWVLSPREVQVTMCIGACPSQFRAANMHAQIKTSLHRLKPDTVPAPCCVPASYNPMVLIQKTDTGVSLQTYDDLLAKDCHCI

SEQ ID NO: 230 - protein, 210 aa, Artificial Sequence
  source: /note="Description of Artificial Sequence: Synthetic polypeptide"
PSVFLFPPKPKDTLMISRTPEVTCVVVDVSHEDPEVKFNWYVDGVEVHNAKTKPREEQYNSTYRVVSVLTVLHQDWLNGKEYKCKVSNKALPAPIEKTISKAKGQPREPQVYTLPPSRKEMTKNQVSLTCLVKGFYPSDIAVEWESNGQPENNYKTTPPVLKSDGSFFLYSKLTVDKSRWQQGNVFSCSVMHEALHNHYTQKSLSLSPGK

SEQ ID NO: 231 - protein, 318 aa, Artificial Sequence
  source: /note="Description of Artificial Sequence: Synthetic polypeptide"
PSVFLFPPKPKDTLMISRTPEVTCVVVDVSHEDPEVKFNWYVDGVEVHNAKTKPREEQYNSTYRVVSVLTVLHQDWLNGKEYKCKVSNKALPAPIEKTISKAKGQPREPQVYTLPPSREEMTKNQVSLTCLVKGFYPSDIAVEWESNGQPENNYDTTPPVLDSDGSFFLYSDLTVDKSRWQQGNVFSCSVMHEALHNHYTQKSLSLSPGGDHCPLGPGRCCRLHTVRASLEDLGWADWVLSPREVQVTMCIGACPSQFRAANMHAQIKTSLHRLKPDTVPAPCCVPASYNPMVLIQKTDTGVSLQTYDDLLAKDCHCI

SEQ ID NO: 232 - protein, 209 aa, Artificial Sequence
  source: /note="Description of Artificial Sequence: Synthetic polypeptide"
PSVFLFPPKPKDTLMISRTPEVTCVVVDVSHEDPEVKFNWYVDGVEVHNAKTKPREEQYNSTYRVVSVLTVLHQDWLNGKEYKCKVSNKALPAPIEKTISKAKGQPREPQVYTLPPSREEMTKNQVSLTCLVKGFYPSDIAVEWESNGQPENNYDTTPPVLDSDGSFFLYSDLTVDKSRWQQGNVFSCSVMHEALHNHYTQKSLSLSPG

SEQ ID NO: 233 - protein, 209 aa, Artificial Sequence
  source: /note="Description of Artificial Sequence: Synthetic polypeptide"
PSVFLFPPKPKDTLMISRTPEVTCVVVDVSHEDPEVKFNWYVDGVEVHNAKTKPREEQYNSTYRVVSVLTVLHQDWLNGKEYKCKVSNKALPAPIEKTISKAKGQPREPQVYTLPPSRKEMTKNQVSLTCLVKGFYPSDIAVEWESNGQPENNYKTTPPVLKSDGSFFLYSKLTVDKSRWQQGNVFSCSVMHEALHNHYTQKSLSLSPG

SEQ ID NO: 234 - protein, 321 aa, Artificial Sequence
  source: /note="Description of Artificial Sequence: Synthetic polypeptide"
PSVFLFPPKPKDTLMISRTPEVTCVVVDVSHEDPEVKFNWYVDGVEVHNAKTKPREEQYNSTYRVVSVLTVLHQDWLNGKEYKCKVSNKALPAPIEKTISKAKGQPREPQVYTLPPSREEMTKNQVSLTCLVKGFYPSDIAVEWESNGQPENNYDTTPPVLDSDGSFFLYSDLTVDKSRWQQGNVFSCSVMHEALHNHYTQKSLSLSPGARDGDHCPLGPGRCCRLHTVRASLEDLGWADWVLSPREVQVTMCIGACPSQFRAANMHAQIKTSLHRLKPDTVPAPCCVPASYNPMVLIQKTDTGVSLQTYDDLLAKDCHCI

SEQ ID NO: 235 - protein, 210 aa, Artificial Sequence
  source: /note="Description of Artificial Sequence: Synthetic polypeptide"
PSVFLFPPKPKDTLMISRTPEVTCVVVDVSHEDPEVKFNWYVDGVEVHNAKTKPREEQYNSTYRVVSVLTVLHQDWLNGKEYKCKVSNKALPAPIEKTISKAKGQPREPQVYTLPPCRKEMTKNQVSLTCLVKGFYPSDIAVEWESNGQPENNYKTTPPVLKSDGSFFLYSKLTVDKSRWQQGNVFSCSVMHEALHNHYTQKSLSLSPGK

SEQ ID NO: 236 - protein, 318 aa, Artificial Sequence
  source: /note="Description of Artificial Sequence: Synthetic polypeptide"
PSVFLFPPKPKDTLMISRTPEVTCVVVDVSHEDPEVKFNWYVDGVEVHNAKTKPREEQYNSTYRVVSVLTVLHQDWLNGKEYKCKVSNKALPAPIEKTISKAKGQPREPQVCTLPPSREEMTKNQVSLTCLVKGFYPSDIAVEWESNGQPENNYDTTPPVLDSDGSFFLYSDLTVDKSRWQQGNVFSCSVMHEALHNHYTQKSLSLSPGGDHCPLGPGRCCRLHTVRASLEDLGWADWVLSPREVQVTMCIGACPSQFRAANMHAQIKTSLHRLKPDTVPAPCCVPASYNPMVLIQKTDTGVSLQTYDDLLAKDCHCI

SEQ ID NO: 237 - protein, 209 aa, Artificial Sequence
  source: /note="Description of Artificial Sequence: Synthetic polypeptide"
PSVFLFPPKPKDTLMISRTPEVTCVVVDVSHEDPEVKFNWYVDGVEVHNAKTKPREEQYNSTYRVVSVLTVLHQDWLNGKEYKCKVSNKALPAPIEKTISKAKGQPREPQVCTLPPSREEMTKNQVSLTCLVKGFYPSDIAVEWESNGQPENNYDTTPPVLDSDGSFFLYSDLTVDKSRWQQGNVFSCSVMHEALHNHYTQKSLSLSPG

SEQ ID NO: 238 - protein, 209 aa, Artificial Sequence
  source: /note="Description of Artificial Sequence: Synthetic polypeptide"
PSVFLFPPKPKDTLMISRTPEVTCVVVDVSHEDPEVKFNWYVDGVEVHNAKTKPREEQYNSTYRVVSVLTVLHQDWLNGKEYKCKVSNKALPAPIEKTISKAKGQPREPQVYTLPPCRKEMTKNQVSLTCLVKGFYPSDIAVEWESNGQPENNYKTTPPVLKSDGSFFLYSKLTVDKSRWQQGNVFSCSVMHEALHNHYTQKSLSLSPG

SEQ ID NO: 239 - protein, 321 aa, Artificial Sequence
  source: /note="Description of Artificial Sequence: Synthetic polypeptide"
PSVFLFPPKPKDTLMISRTPEVTCVVVDVSHEDPEVKFNWYVDGVEVHNAKTKPREEQYNSTYRVVSVLTVLHQDWLNGKEYKCKVSNKALPAPIEKTISKAKGQPREPQVCTLPPSREEMTKNQVSLTCLVKGFYPSDIAVEWESNGQPENNYDTTPPVLDSDGSFFLYSDLTVDKSRWQQGNVFSCSVMHEALHNHYTQKSLSLSPGARDGDHCPLGPGRCCRLHTVRASLEDLGWADWVLSPREVQVTMCIGACPSQFRAANMHAQIKTSLHRLKPDTVPAPCCVPASYNPMVLIQKTDTGVSLQTYDDLLAKDCHCI

SEQ ID NO: 240 - protein, 227 aa, Artificial Sequence
  source: /note="Description of Artificial Sequence: Synthetic polypeptide"
DKTHTCPPCPAPELLGGPSVFLFPPKPKDTLMISRTPEVTCVVVDVSHEDPEVKFNWYVDGVEVHNAKTKPREEQYGSTYRVVSVLTVLHQDWLNGKEYKCKVSNKALPAPIEKTISKAKGQPREPQVYTLPPSRKEMTKNQVSLTCLVKGFYPSDIAVEWESNGQPENNYKTTPPVLKSDGSFFLYSKLTVDKSRWQQGNVFSCSVMHEALHNHYTQKSLSLSPGK

SEQ ID NO: 241 - protein, 335 aa, Artificial Sequence
  source: /note="Description of Artificial Sequence: Synthetic polypeptide"
DKTHTCPPCPAPELLGGPSVFLFPPKPKDTLMISRTPEVTCVVVDVSHEDPEVKFNWYVDGVEVHNAKTKPREEQYGSTYRVVSVLTVLHQDWLNGKEYKCKVSNKALPAPIEKTISKAKGQPREPQVYTLPPSREEMTKNQVSLTCLVKGFYPSDIAVEWESNGQPENNYDTTPPVLDSDGSFFLYSDLTVDKSRWQQGNVFSCSVMHEALHNHYTQKSLSLSPGGDHCPLGPGRCCRLHTVRASLEDLGWADWVLSPREVQVTMCIGACPSQFRAANMHAQIKTSLHRLKPDTVPAPCCVPASYNPMVLIQKTDTGVSLQTYDDLLAKDCHCI

SEQ ID NO: 242 - protein, 226 aa, Artificial Sequence
  source: /note="Description of Artificial Sequence: Synthetic polypeptide"
DKTHTCPPCPAPELLGGPSVFLFPPKPKDTLMISRTPEVTCVVVDVSHEDPEVKFNWYVDGVEVHNAKTKPREEQYGSTYRVVSVLTVLHQDWLNGKEYKCKVSNKALPAPIEKTISKAKGQPREPQVYTLPPSREEMTKNQVSLTCLVKGFYPSDIAVEWESNGQPENNYDTTPPVLDSDGSFFLYSDLTVDKSRWQQGNVFSCSVMHEALHNHYTQKSLSLSPG

SEQ ID NO: 243 - protein, 226 aa, Artificial Sequence
  source: /note="Description of Artificial Sequence: Synthetic polypeptide"
DKTHTCPPCPAPELLGGPSVFLFPPKPKDTLMISRTPEVTCVVVDVSHEDPEVKFNWYVDGVEVHNAKTKPREEQYGSTYRVVSVLTVLHQDWLNGKEYKCKVSNKALPAPIEKTISKAKGQPREPQVYTLPPSRKEMTKNQVSLTCLVKGFYPSDIAVEWESNGQPENNYKTTPPVLKSDGSFFLYSKLTVDKSRWQQGNVFSCSVMHEALHNHYTQKSLSLSPG

SEQ ID NO: 244 - protein, 338 aa, Artificial Sequence
  source: /note="Description of Artificial Sequence: Synthetic polypeptide"
DKTHTCPPCPAPELLGGPSVFLFPPKPKDTLMISRTPEVTCVVVDVSHEDPEVKFNWYVDGVEVHNAKTKPREEQYGSTYRVVSVLTVLHQDWLNGKEYKCKVSNKALPAPIEKTISKAKGQPREPQVYTLPPSREEMTKNQVSLTCLVKGFYPSDIAVEWESNGQPENNYDTTPPVLDSDGSFFLYSDLTVDKSRWQQGNVFSCSVMHEALHNHYTQKSLSLSPGARDGDHCPLGPGRCCRLHTVRASLEDLGWADWVLSPREVQVTMCIGACPSQFRAANMHAQIKTSLHRLKPDTVPAPCCVPASYNPMVLIQKTDTGVSLQTYDDLLAKDCHCI

SEQ ID NO: 245 - protein, 210 aa, Artificial Sequence
  source: /note="Description of Artificial Sequence: Synthetic polypeptide"
PSVFLFPPKPKDTLMISRTPEVTCVVVDVSHEDPEVKFNWYVDGVEVHNAKTKPREEQYGSTYRVVSVLTVLHQDWLNGKEYKCKVSNKALPAPIEKTISKAKGQPREPQVYTLPPSRKEMTKNQVSLTCLVKGFYPSDIAVEWESNGQPENNYKTTPPVLKSDGSFFLYSKLTVDKSRWQQGNVFSCSVMHEALHNHYTQKSLSLSPGK

SEQ ID NO: 246 - protein, 318 aa, Artificial Sequence
  source: /note="Description of Artificial Sequence: Synthetic polypeptide"
PSVFLFPPKPKDTLMISRTPEVTCVVVDVSHEDPEVKFNWYVDGVEVHNAKTKPREEQYGSTYRVVSVLTVLHQDWLNGKEYKCKVSNKALPAPIEKTISKAKGQPREPQVYTLPPSREEMTKNQVSLTCLVKGFYPSDIAVEWESNGQPENNYDTTPPVLDSDGSFFLYSDLTVDKSRWQQGNVFSCSVMHEALHNHYTQKSLSLSPGGDHCPLGPGRCCRLHTVRASLEDLGWADWVLSPREVQVTMCIGACPSQFRAANMHAQIKTSLHRLKPDTVPAPCCVPASYNPMVLIQKTDTGVSLQTYDDLLAKDCHCI

SEQ ID NO: 247 - protein, 209 aa, Artificial Sequence
  source: /note="Description of Artificial Sequence: Synthetic polypeptide"
PSVFLFPPKPKDTLMISRTPEVTCVVVDVSHEDPEVKFNWYVDGVEVHNAKTKPREEQYGSTYRVVSVLTVLHQDWLNGKEYKCKVSNKALPAPIEKTISKAKGQPREPQVYTLPPSREEMTKNQVSLTCLVKGFYPSDIAVEWESNGQPENNYDTTPPVLDSDGSFFLYSDLTVDKSRWQQGNVFSCSVMHEALHNHYTQKSLSLSPG

SEQ ID NO: 248 - protein, 209 aa, Artificial Sequence
  source: /note="Description of Artificial Sequence: Synthetic polypeptide"
PSVFLFPPKPKDTLMISRTPEVTCVVVDVSHEDPEVKFNWYVDGVEVHNAKTKPREEQYGSTYRVVSVLTVLHQDWLNGKEYKCKVSNKALPAPIEKTISKAKGQPREPQVYTLPPSRKEMTKNQVSLTCLVKGFYPSDIAVEWESNGQPENNYKTTPPVLKSDGSFFLYSKLTVDKSRWQQGNVFSCSVMHEALHNHYTQKSLSLSPG

SEQ ID NO: 249 - protein, 321 aa, Artificial Sequence
  source: /note="Description of Artificial Sequence: Synthetic polypeptide"
PSVFLFPPKPKDTLMISRTPEVTCVVVDVSHEDPEVKFNWYVDGVEVHNAKTKPREEQYGSTYRVVSVLTVLHQDWLNGKEYKCKVSNKALPAPIEKTISKAKGQPREPQVYTLPPSREEMTKNQVSLTCLVKGFYPSDIAVEWESNGQPENNYDTTPPVLDSDGSFFLYSDLTVDKSRWQQGNVFSCSVMHEALHNHYTQKSLSLSPGARDGDHCPLGPGRCCRLHTVRASLEDLGWADWVLSPREVQVTMCIGACPSQFRAANMHAQIKTSLHRLKPDTVPAPCCVPASYNPMVLIQKTDTGVSLQTYDDLLAKDCHCI

SEQ ID NO: 250 - protein, 210 aa, Artificial Sequence
  source: /note="Description of Artificial Sequence: Synthetic polypeptide"
PSVFLFPPKPKDTLMISRTPEVTCVVVDVSHEDPEVKFNWYVDGVEVHNAKTKPREEQYGSTYRVVSVLTVLHQDWLNGKEYKCKVSNKALPAPIEKTISKAKGQPREPQVYTLPPCRKEMTKNQVSLTCLVKGFYPSDIAVEWESNGQPENNYKTTPPVLKSDGSFFLYSKLTVDKSRWQQGNVFSCSVMHEALHNHYTQKSLSLSPGK

SEQ ID NO: 251 - protein, 318 aa, Artificial Sequence
  source: /note="Description of Artificial Sequence: Synthetic polypeptide"
PSVFLFPPKPKDTLMISRTPEVTCVVVDVSHEDPEVKFNWYVDGVEVHNAKTKPREEQYGSTYRVVSVLTVLHQDWLNGKEYKCKVSNKALPAPIEKTISKAKGQPREPQVCTLPPSREEMTKNQVSLTCLVKGFYPSDIAVEWESNGQPENNYDTTPPVLDSDGSFFLYSDLTVDKSRWQQGNVFSCSVMHEALHNHYTQKSLSLSPGGDHCPLGPGRCCRLHTVRASLEDLGWADWVLSPREVQVTMCIGACPSQFRAANMHAQIKTSLHRLKPDTVPAPCCVPASYNPMVLIQKTDTGVSLQTYDDLLAKDCHCI

SEQ ID NO: 252 - protein, 209 aa, Artificial Sequence
  source: /note="Description of Artificial Sequence: Synthetic polypeptide"
PSVFLFPPKPKDTLMISRTPEVTCVVVDVSHEDPEVKFNWYVDGVEVHNAKTKPREEQYGSTYRVVSVLTVLHQDWLNGKEYKCKVSNKALPAPIEKTISKAKGQPREPQVCTLPPSREEMTKNQVSLTCLVKGFYPSDIAVEWESNGQPENNYDTTPPVLDSDGSFFLYSDLTVDKSRWQQGNVFSCSVMHEALHNHYTQKSLSLSPG

SEQ ID NO: 253 - protein, 209 aa, Artificial Sequence
  source: /note="Description of Artificial Sequence: Synthetic polypeptide"
PSVFLFPPKPKDTLMISRTPEVTCVVVDVSHEDPEVKFNWYVDGVEVHNAKTKPREEQYGSTYRVVSVLTVLHQDWLNGKEYKCKVSNKALPAPIEKTISKAKGQPREPQVYTLPPCRKEMTKNQVSLTCLVKGFYPSDIAVEWESNGQPENNYKTTPPVLKSDGSFFLYSKLTVDKSRWQQGNVFSCSVMHEALHNHYTQKSLSLSPG

SEQ ID NO: 254 - protein, 321 aa, Artificial Sequence
  source: /note="Description of Artificial Sequence: Synthetic polypeptide"
PSVFLFPPKPKDTLMISRTPEVTCVVVDVSHEDPEVKFNWYVDGVEVHNAKTKPREEQYGSTYRVVSVLTVLHQDWLNGKEYKCKVSNKALPAPIEKTISKAKGQPREPQVCTLPPSREEMTKNQVSLTCLVKGFYPSDIAVEWESNGQPENNYDTTPPVLDSDGSFFLYSDLTVDKSRWQQGNVFSCSVMHEALHNHYTQKSLSLSPGARDGDHCPLGPGRCCRLHTVRASLEDLGWADWVLSPREVQVTMCIGACPSQFRAANMHAQIKTSLHRLKPDTVPAPCCVPASYNPMVLIQKTDTGVSLQTYDDLLAKDCHCI

SEQ ID NO: 255 - protein, 210 aa, Artificial Sequence
  source: /note="Description of Artificial Sequence: Synthetic polypeptide"
PSVFLFPPKPKDTLMISRTPEVTCVVVDVSHEDPEVKFNWYVDGVEVHNCKTKPREEQYGSTYRVVSVCTVLHQDWLNGKEYKCKVSNKALPAPIEKTISKAKGQPREPQVYTLPPSRKEMTKNQVSLTCLVKGFYPSDIAVEWESNGQPENNYKTTPPVLKSDGSFFLYSKLTVDKSRWQQGNVFSCSVMHEALHNHYTQKSLSLSPGK

SEQ ID NO: 256 - protein, 318 aa, Artificial Sequence
  source: /note="Description of Artificial Sequence: Synthetic polypeptide"
PSVFLFPPKPKDTLMISRTPEVTCVVVDVSHEDPEVKFNWYVDGVEVHNCKTKPREEQYGSTYRVVSVCTVLHQDWLNGKEYKCKVSNKALPAPIEKTISKAKGQPREPQVYTLPPSREEMTKNQVSLTCLVKGFYPSDIAVEWESNGQPENNYDTTPPVLDSDGSFFLYSDLTVDKSRWQQGNVFSCSVMHEALHNHYTQKSLSLSPGGDHCPLGPGRCCRLHTVRASLEDLGWADWVLSPREVQVTMCIGACPSQFRAANMHAQIKTSLHRLKPDTVPAPCCVPASYNPMVLIQKTDTGVSLQTYDDLLAKDCHCI

SEQ ID NO: 257 - protein, 209 aa, Artificial Sequence
  source: /note="Description of Artificial Sequence: Synthetic polypeptide"
PSVFLFPPKPKDTLMISRTPEVTCVVVDVSHEDPEVKFNWYVDGVEVHNCKTKPREEQYGSTYRVVSVCTVLHQDWLNGKEYKCKVSNKALPAPIEKTISKAKGQPREPQVYTLPPSREEMTKNQVSLTCLVKGFYPSDIAVEWESNGQPENNYDTTPPVLDSDGSFFLYSDLTVDKSRWQQGNVFSCSVMHEALHNHYTQKSLSLSPG

SEQ ID NO: 258 - protein, 209 aa, Artificial Sequence
  source: /note="Description of Artificial Sequence: Synthetic polypeptide"
PSVFLFPPKPKDTLMISRTPEVTCVVVDVSHEDPEVKFNWYVDGVEVHNCKTKPREEQYGSTYRVVSVCTVLHQDWLNGKEYKCKVSNKALPAPIEKTISKAKGQPREPQVYTLPPSRKEMTKNQVSLTCLVKGFYPSDIAVEWESNGQPENNYKTTPPVLKSDGSFFLYSKLTVDKSRWQQGNVFSCSVMHEALHNHYTQKSLSLSPG

SEQ ID NO: 259 - protein, 321 aa, Artificial Sequence
  source: /note="Description of Artificial Sequence: Synthetic polypeptide"
PSVFLFPPKPKDTLMISRTPEVTCVVVDVSHEDPEVKFNWYVDGVEVHNCKTKPREEQYGSTYRVVSVCTVLHQDWLNGKEYKCKVSNKALPAPIEKTISKAKGQPREPQVYTLPPSREEMTKNQVSLTCLVKGFYPSDIAVEWESNGQPENNYDTTPPVLDSDGSFFLYSDLTVDKSRWQQGNVFSCSVMHEALHNHYTQKSLSLSPGARDGDHCPLGPGRCCRLHTVRASLEDLGWADWVLSPREVQVTMCIGACPSQFRAANMHAQIKTSLHRLKPDTVPAPCCVPASYNPMVLIQKTDTGVSLQTYDDLLAKDCHCI

SEQ ID NO: 260 - protein, 210 aa, Artificial Sequence
  source: /note="Description of Artificial Sequence: Synthetic polypeptide"
PSVFLFPPKPKDTLMISRTPEVTCVVVDVSHEDPEVKFNWYVDGVEVHNCKTKPREEQYGSTYRVVSVCTVLHQDWLNGKEYKCKVSNKALPAPIEKTISKAKGQPREPQVYTLPPCRKEMTKNQVSLTCLVKGFYPSDIAVEWESNGQPENNYKTTPPVLKSDGSFFLYSKLTVDKSRWQQGNVFSCSVMHEALHNHYTQKSLSLSPGK

SEQ ID NO: 261 - protein, 318 aa, Artificial Sequence
  source: /note="Description of Artificial Sequence: Synthetic polypeptide"
PSVFLFPPKPKDTLMISRTPEVTCVVVDVSHEDPEVKFNWYVDGVEVHNCKTKPREEQYGSTYRVVSVCTVLHQDWLNGKEYKCKVSNKALPAPIEKTISKAKGQPREPQVCTLPPSREEMTKNQVSLTCLVKGFYPSDIAVEWESNGQPENNYDTTPPVLDSDGSFFLYSDLTVDKSRWQQGNVFSCSVMHEALHNHYTQKSLSLSPGGDHCPLGPGRCCRLHTVRASLEDLGWADWVLSPREVQVTMCIGACPSQFRAANMHAQIKTSLHRLKPDTVPAPCCVPASYNPMVLIQKTDTGVSLQTYDDLLAKDCHCI

SEQ ID NO: 262 - protein, 209 aa, Artificial Sequence
  source: /note="Description of Artificial Sequence: Synthetic polypeptide"
PSVFLFPPKPKDTLMISRTPEVTCVVVDVSHEDPEVKFNWYVDGVEVHNCKTKPREEQYGSTYRVVSVCTVLHQDWLNGKEYKCKVSNKALPAPIEKTISKAKGQPREPQVCTLPPSREEMTKNQVSLTCLVKGFYPSDIAVEWESNGQPENNYDTTPPVLDSDGSFFLYSDLTVDKSRWQQGNVFSCSVMHEALHNHYTQKSLSLSPG

SEQ ID NO: 263 - protein, 209 aa, Artificial Sequence
  source: /note="Description of Artificial Sequence: Synthetic polypeptide"
PSVFLFPPKPKDTLMISRTPEVTCVVVDVSHEDPEVKFNWYVDGVEVHNCKTKPREEQYGSTYRVVSVCTVLHQDWLNGKEYKCKVSNKALPAPIEKTISKAKGQPREPQVYTLPPCRKEMTKNQVSLTCLVKGFYPSDIAVEWESNGQPENNYKTTPPVLKSDGSFFLYSKLTVDKSRWQQGNVFSCSVMHEALHNHYTQKSLSLSPG

SEQ ID NO: 264 - protein, 321 aa, Artificial Sequence
  source: /note="Description of Artificial Sequence: Synthetic polypeptide"
PSVFLFPPKPKDTLMISRTPEVTCVVVDVSHEDPEVKFNWYVDGVEVHNCKTKPREEQYGSTYRVVSVCTVLHQDWLNGKEYKCKVSNKALPAPIEKTISKAKGQPREPQVCTLPPSREEMTKNQVSLTCLVKGFYPSDIAVEWESNGQPENNYDTTPPVLDSDGSFFLYSDLTVDKSRWQQGNVFSCSVMHEALHNHYTQKSLSLSPGARDGDHCPLGPGRCCRLHTVRASLEDLGWADWVLSPREVQVTMCIGACPSQFRAANMHAQIKTSLHRLKPDTVPAPCCVPASYNPMVLIQKTDTGVSLQTYDDLLAKDCHCI

SEQ ID NO: 265 - protein, 212 aa, Artificial Sequence
  source: /note="Description of Artificial Sequence: Synthetic polypeptide"
GGPSVFLFPPKPKDTLMISRTPEVTCVVVDVSHEDPEVKFNWYVDGVEVHNAKTKPREEQYNSTYRVVSVLTVLHQDWLNGKEYKCKVSNKALPAPIEKTISKAKGQPREPQVYTLPPSRKEMTKNQVSLTCLVKGFYPSDIAVEWESNGQPENNYKTTPPVLKSDGSFFLYSKLTVDKSRWQQGNVFSCSVMHEALHNHYTQKSLSLSPGK

SEQ ID NO: 266 - protein, 231 aa, Artificial Sequence
  source: /note="Description of Artificial Sequence: Synthetic polypeptide"
MEWSWVFLFFLSVTTGVHSGGPSVFLFPPKPKDTLMISRTPEVTCVVVDVSHEDPEVKFNWYVDGVEVHNAKTKPREEQYNSTYRVVSVLTVLHQDWLNGKEYKCKVSNKALPAPIEKTISKAKGQPREPQVYTLPPSRKEMTKNQVSLTCLVKGFYPSDIAVEWESNGQPENNYKTTPPVLKSDGSFFLYSKLTVDKSRWQQGNVFSCSVMHEALHNHYTQKSLSLSPGK

SEQ ID NO: 267 - protein, 320 aa, Artificial Sequence
  source: /note="Description of Artificial Sequence: Synthetic polypeptide"
GGPSVFLFPPKPKDTLMISRTPEVTCVVVDVSHEDPEVKFNWYVDGVEVHNAKTKPREEQYNSTYRVVSVLTVLHQDWLNGKEYKCKVSNKALPAPIEKTISKAKGQPREPQVYTLPPSREEMTKNQVSLTCLVKGFYPSDIAVEWESNGQPENNYDTTPPVLDSDGSFFLYSDLTVDKSRWQQGNVFSCSVMHEALHNHYTQKSLSLSPGGDHCPLGPGRCCRLHTVRASLEDLGWADWVLSPREVQVTMCIGACPSQFRAANMHAQIKTSLHRLKPDTVPAPCCVPASYNPMVLIQKTDTGVSLQTYDDLLAKDCHCI

SEQ ID NO: 268 - protein, 339 aa, Artificial Sequence
  source: /note="Description of Artificial Sequence: Synthetic polypeptide"
MEWSWVFLFFLSVTTGVHSGGPSVFLFPPKPKDTLMISRTPEVTCVVVDVSHEDPEVKFNWYVDGVEVHNAKTKPREEQYNSTYRVVSVLTVLHQDWLNGKEYKCKVSNKALPAPIEKTISKAKGQPREPQVYTLPPSREEMTKNQVSLTCLVKGFYPSDIAVEWESNGQPENNYDTTPPVLDSDGSFFLYSDLTVDKSRWQQGNVFSCSVMHEALHNHYTQKSLSLSPGGDHCPLGPGRCCRLHTVRASLEDLGWADWVLSPREVQVTMCIGACPSQFRAANMHAQIKTSLHRLKPDTVPAPCCVPASYNPMVLIQKTDTGVSLQTYDDLLAKDCHCI

SEQ ID NO: 269 - protein, 211 aa, Artificial Sequence
  source: /note="Description of Artificial Sequence: Synthetic polypeptide"
GGPSVFLFPPKPKDTLMISRTPEVTCVVVDVSHEDPEVKFNWYVDGVEVHNAKTKPREEQYNSTYRVVSVLTVLHQDWLNGKEYKCKVSNKALPAPIEKTISKAKGQPREPQVYTLPPSREEMTKNQVSLTCLVKGFYPSDIAVEWESNGQPENNYDTTPPVLDSDGSFFLYSDLTVDKSRWQQGNVFSCSVMHEALHNHYTQKSLSLSPG

SEQ ID NO: 270 - protein, 211 aa, Artificial Sequence
  source: /note="Description of Artificial Sequence: Synthetic polypeptide"
GGPSVFLFPPKPKDTLMISRTPEVTCVVVDVSHEDPEVKFNWYVDGVEVHNAKTKPREEQYNSTYRVVSVLTVLHQDWLNGKEYKCKVSNKALPAPIEKTISKAKGQPREPQVYTLPPSRKEMTKNQVSLTCLVKGFYPSDIAVEWESNGQPENNYKTTPPVLKSDGSFFLYSKLTVDKSRWQQGNVFSCSVMHEALHNHYTQKSLSLSPG

SEQ ID NO: 271 - protein, 323 aa, Artificial Sequence
  source: /note="Description of Artificial Sequence: Synthetic polypeptide"
GGPSVFLFPPKPKDTLMISRTPEVTCVVVDVSHEDPEVKFNWYVDGVEVHNAKTKPREEQYNSTYRVVSVLTVLHQDWLNGKEYKCKVSNKALPAPIEKTISKAKGQPREPQVYTLPPSREEMTKNQVSLTCLVKGFYPSDIAVEWESNGQPENNYDTTPPVLDSDGSFFLYSDLTVDKSRWQQGNVFSCSVMHEALHNHYTQKSLSLSPGARDGDHCPLGPGRCCRLHTVRASLEDLGWADWVLSPREVQVTMCIGACPSQFRAANMHAQIKTSLHRLKPDTVPAPCCVPASYNPMVLIQKTDTGVSLQTYDDLLAKDCHCI

SEQ ID NO: 272 - protein, 342 aa, Artificial Sequence
  source: /note="Description of Artificial Sequence: Synthetic polypeptide"
MEWSWVFLFFLSVTTGVHSGGPSVFLFPPKPKDTLMISRTPEVTCVVVDVSHEDPEVKFNWYVDGVEVHNAKTKPREEQYNSTYRVVSVLTVLHQDWLNGKEYKCKVSNKALPAPIEKTISKAKGQPREPQVYTLPPSREEMTKNQVSLTCLVKGFYPSDIAVEWESNGQPENNYDTTPPVLDSDGSFFLYSDLTVDKSRWQQGNVFSCSVMHEALHNHYTQKSLSLSPGARDGDHCPLGPGRCCRLHTVRASLEDLGWADWVLSPREVQVTMCIGACPSQFRAANMHAQIKTSLHRLKPDTVPAPCCVPASYNPMVLIQKTDTGVSLQTYDDLLAKDCHCI

SEQ ID NO: 273 - protein, 212 aa, Artificial Sequence
  source: /note="Description of Artificial Sequence: Synthetic polypeptide"
GGPSVFLFPPKPKDTLMISRTPEVTCVVVDVSHEDPEVKFNWYVDGVEVHNAKTKPREEQYNSTYRVVSVLTVLHQDWLNGKEYKCKVSNKALPAPIEKTISKAKGQPREPQVYTLPPCRKEMTKNQVSLTCLVKGFYPSDIAVEWESNGQPENNYKTTPPVLKSDGSFFLYSKLTVDKSRWQQGNVFSCSVMHEALHNHYTQKSLSLSPGK

SEQ ID NO: 274 - protein, 231 aa, Artificial Sequence
  source: /note="Description of Artificial Sequence: Synthetic polypeptide"
MEWSWVFLFFLSVTTGVHSGGPSVFLFPPKPKDTLMISRTPEVTCVVVDVSHEDPEVKFNWYVDGVEVHNAKTKPREEQYNSTYRVVSVLTVLHQDWLNGKEYKCKVSNKALPAPIEKTISKAKGQPREPQVYTLPPCRKEMTKNQVSLTCLVKGFYPSDIAVEWESNGQPENNYKTTPPVLKSDGSFFLYSKLTVDKSRWQQGNVFSCSVMHEALHNHYTQKSLSLSPGK

SEQ ID NO: 275 - protein, 320 aa, Artificial Sequence
  source: /note="Description of Artificial Sequence: Synthetic polypeptide"
GGPSVFLFPPKPKDTLMISRTPEVTCVVVDVSHEDPEVKFNWYVDGVEVHNAKTKPREEQYNSTYRVVSVLTVLHQDWLNGKEYKCKVSNKALPAPIEKTISKAKGQPREPQVCTLPPSREEMTKNQVSLTCLVKGFYPSDIAVEWESNGQPENNYDTTPPVLDSDGSFFLYSDLTVDKSRWQQGNVFSCSVMHEALHNHYTQKSLSLSPGGDHCPLGPGRCCRLHTVRASLEDLGWADWVLSPREVQVTMCIGACPSQFRAANMHAQIKTSLHRLKPDTVPAPCCVPASYNPMVLIQKTDTGVSLQTYDDLLAKDCHCI

SEQ ID NO: 276 - protein, 339 aa, Artificial Sequence
  source: /note="Description of Artificial Sequence: Synthetic polypeptide"
MEWSWVFLFFLSVTTGVHSGGPSVFLFPPKPKDTLMISRTPEVTCVVVDVSHEDPEVKFNWYVDGVEVHNAKTKPREEQYNSTYRVVSVLTVLHQDWLNGKEYKCKVSNKALPAPIEKTISKAKGQPREPQVCTLPPSREEMTKNQVSLTCLVKGFYPSDIAVEWESNGQPENNYDTTPPVLDSDGSFFLYSDLTVDKSRWQQGNVFSCSVMHEALHNHYTQKSLSLSPGGDHCPLGPGRCCRLHTVRASLEDLGWADWVLSPREVQVTMCIGACPSQFRAANMHAQIKTSLHRLKPDTVPAPCCVPASYNPMVLIQKTDTGVSLQTYDDLLAKDCHCI

SEQ ID NO: 277 - protein, 211 aa, Artificial Sequence
  source: /note="Description of Artificial Sequence: Synthetic polypeptide"
GGPSVFLFPPKPKDTLMISRTPEVTCVVVDVSHEDPEVKFNWYVDGVEVHNAKTKPREEQYNSTYRVVSVLTVLHQDWLNGKEYKCKVSNKALPAPIEKTISKAKGQPREPQVCTLPPSREEMTKNQVSLTCLVKGFYPSDIAVEWESNGQPENNYDTTPPVLDSDGSFFLYSDLTVDKSRWQQGNVFSCSVMHEALHNHYTQKSLSLSPG

SEQ ID NO: 278 - protein, 211 aa, Artificial Sequence
  source: /note="Description of Artificial Sequence: Synthetic polypeptide"
GGPSVFLFPPKPKDTLMISRTPEVTCVVVDVSHEDPEVKFNWYVDGVEVHNAKTKPREEQYNSTYRVVSVLTVLHQDWLNGKEYKCKVSNKALPAPIEKTISKAKGQPREPQVYTLPPCRKEMTKNQVSLTCLVKGFYPSDIAVEWESNGQPENNYKTTPPVLKSDGSFFLYSKLTVDKSRWQQGNVFSCSVMHEALHNHYTQKSLSLSPG

SEQ ID NO: 279 - protein, 323 aa, Artificial Sequence
  source: /note="Description of Artificial Sequence: Synthetic polypeptide"
GGPSVFLFPPKPKDTLMISRTPEVTCVVVDVSHEDPEVKFNWYVDGVEVHNAKTKPREEQYNSTYRVVSVLTVLHQDWLNGKEYKCKVSNKALPAPIEKTISKAKGQPREPQVCTLPPSREEMTKNQVSLTCLVKGFYPSDIAVEWESNGQPENNYDTTPPVLDSDGSFFLYSDLTVDKSRWQQGNVFSCSVMHEALHNHYTQKSLSLSPGARDGDHCPLGPGRCCRLHTVRASLEDLGWADWVLSPREVQVTMCIGACPSQFRAANMHAQIKTSLHRLKPDTVPAPCCVPASYNPMVLIQKTDTGVSLQTYDDLLAKDCHCI

SEQ ID NO: 280 - protein, 342 aa, Artificial Sequence
  source: /note="Description of Artificial Sequence: Synthetic polypeptide"
MEWSWVFLFFLSVTTGVHSGGPSVFLFPPKPKDTLMISRTPEVTCVVVDVSHEDPEVKFNWYVDGVEVHNAKTKPREEQYNSTYRVVSVLTVLHQDWLNGKEYKCKVSNKALPAPIEKTISKAKGQPREPQVCTLPPSREEMTKNQVSLTCLVKGFYPSDIAVEWESNGQPENNYDTTPPVLDSDGSFFLYSDLTVDKSRWQQGNVFSCSVMHEALHNHYTQKSLSLSPGARDGDHCPLGPGRCCRLHTVRASLEDLGWADWVLSPREVQVTMCIGACPSQFRAANMHAQIKTSLHRLKPDTVPAPCCVPASYNPMVLIQKTDTGVSLQTYDDLLAKDCHCI

SEQ ID NO: 281 - protein, 211 aa, Artificial Sequence
  source: /note="Description of Artificial Sequence: Synthetic polypeptide"
GPSVFLFPPKPKDTLMISRTPEVTCVVVDVSHEDPEVKFNWYVDGVEVHNAKTKPREEQYNSTYRVVSVLTVLHQDWLNGKEYKCKVSNKALPAPIEKTISKAKGQPREPQVYTLPPSRKEMTKNQVSLTCLVKGFYPSDIAVEWESNGQPENNYKTTPPVLKSDGSFFLYSKLTVDKSRWQQGNVFSCSVMHEALHNHYTQKSLSLSPGK

SEQ ID NO: 282 - protein, 233 aa, Artificial Sequence
  source: /note="Description of Artificial Sequence: Synthetic polypeptide"
MDMRVPAQLLGLLLLWLRGARCGPSVFLFPPKPKDTLMISRTPEVTCVVVDVSHEDPEVKFNWYVDGVEVHNAKTKPREEQYNSTYRVVSVLTVLHQDWLNGKEYKCKVSNKALPAPIEKTISKAKGQPREPQVYTLPPSRKEMTKNQVSLTCLVKGFYPSDIAVEWESNGQPENNYKTTPPVLKSDGSFFLYSKLTVDKSRWQQGNVFSCSVMHEALHNHYTQKSLSLSPGK

SEQ ID NO: 283 - protein, 319 aa, Artificial Sequence
  source: /note="Description of Artificial Sequence: Synthetic polypeptide"
GPSVFLFPPKPKDTLMISRTPEVTCVVVDVSHEDPEVKFNWYVDGVEVHNAKTKPREEQYNSTYRVVSVLTVLHQDWLNGKEYKCKVSNKALPAPIEKTISKAKGQPREPQVYTLPPSREEMTKNQVSLTCLVKGFYPSDIAVEWESNGQPENNYDTTPPVLDSDGSFFLYSDLTVDKSRWQQGNVFSCSVMHEALHNHYTQKSLSLSPGGDHCPLGPGRCCRLHTVRASLEDLGWADWVLSPREVQVTMCIGACPSQFRAANMHAQIKTSLHRLKPDTVPAPCCVPASYNPMVLIQKTDTGVSLQTYDDLLAKDCHCI

SEQ ID NO: 284 - protein, 341 aa, Artificial Sequence
  source: /note="Description of Artificial Sequence: Synthetic polypeptide"
MDMRVPAQLLGLLLLWLRGARCGPSVFLFPPKPKDTLMISRTPEVTCVVVDVSHEDPEVKFNWYVDGVEVHNAKTKPREEQYNSTYRVVSVLTVLHQDWLNGKEYKCKVSNKALPAPIEKTISKAKGQPREPQVYTLPPSREEMTKNQVSLTCLVKGFYPSDIAVEWESNGQPENNYDTTPPVLDSDGSFFLYSDLTVDKSRWQQGNVFSCSVMHEALHNHYTQKSLSLSPGGDHCPLGPGRCCRLHTVRASLEDLGWADWVLSPREVQVTMCIGACPSQFRAANMHAQIKTSLHRLKPDTVPAPCCVPASYNPMVLIQKTDTGVSLQTYDDLLAKDCHCI

SEQ ID NO: 285 - protein, 210 aa, Artificial Sequence
  source: /note="Description of Artificial Sequence: Synthetic polypeptide"
GPSVFLFPPKPKDTLMISRTPEVTCVVVDVSHEDPEVKFNWYVDGVEVHNAKTKPREEQYNSTYRVVSVLTVLHQDWLNGKEYKCKVSNKALPAPIEKTISKAKGQPREPQVYTLPPSREEMTKNQVSLTCLVKGFYPSDIAVEWESNGQPENNYDTTPPVLDSDGSFFLYSDLTVDKSRWQQGNVFSCSVMHEALHNHYTQKSLSLSPG

SEQ ID NO: 286 - protein, 210 aa, Artificial Sequence
  source: /note="Description of Artificial Sequence: Synthetic polypeptide"
GPSVFLFPPKPKDTLMISRTPEVTCVVVDVSHEDPEVKFNWYVDGVEVHNAKTKPREEQYNSTYRVVSVLTVLHQDWLNGKEYKCKVSNKALPAPIEKTISKAKGQPREPQVYTLPPSRKEMTKNQVSLTCLVKGFYPSDIAVEWESNGQPENNYKTTPPVLKSDGSFFLYSKLTVDKSRWQQGNVFSCSVMHEALHNHYTQKSLSLSPG

SEQ ID NO: 287 - protein, 322 aa, Artificial Sequence
  source: /note="Description of Artificial Sequence: Synthetic polypeptide"
GPSVFLFPPKPKDTLMISRTPEVTCVVVDVSHEDPEVKFNWYVDGVEVHNAKTKPREEQYNSTYRVVSVLTVLHQDWLNGKEYKCKVSNKALPAPIEKTISKAKGQPREPQVYTLPPSREEMTKNQVSLTCLVKGFYPSDIAVEWESNGQPENNYDTTPPVLDSDGSFFLYSDLTVDKSRWQQGNVFSCSVMHEALHNHYTQKSLSLSPGARDGDHCPLGPGRCCRLHTVRASLEDLGWADWVLSPREVQVTMCIGACPSQFRAANMHAQIKTSLHRLKPDTVPAPCCVPASYNPMVLIQKTDTGVSLQTYDDLLAKDCHCI

SEQ ID NO: 288 - protein, 344 aa, Artificial Sequence
  source: /note="Description of Artificial Sequence: Synthetic polypeptide"
MDMRVPAQLLGLLLLWLRGARCGPSVFLFPPKPKDTLMISRTPEVTCVVVDVSHEDPEVKFNWYVDGVEVHNAKTKPREEQYNSTYRVVSVLTVLHQDWLNGKEYKCKVSNKALPAPIEKTISKAKGQPREPQVYTLPPSREEMTKNQVSLTCLVKGFYPSDIAVEWESNGQPENNYDTTPPVLDSDGSFFLYSDLTVDKSRWQQGNVFSCSVMHEALHNHYTQKSLSLSPGARDGDHCPLGPGRCCRLHTVRASLEDLGWADWVLSPREVQVTMCIGACPSQFRAANMHAQIKTSLHRLKPDTVPAPCCVPASYNPMVLIQKTDTGVSLQTYDDLLAKDCHCI

SEQ ID NO: 289 - protein, 211 aa, Artificial Sequence
  source: /note="Description of Artificial Sequence: Synthetic polypeptide"
GPSVFLFPPKPKDTLMISRTPEVTCVVVDVSHEDPEVKFNWYVDGVEVHNAKTKPREEQYNSTYRVVSVLTVLHQDWLNGKEYKCKVSNKALPAPIEKTISKAKGQPREPQVYTLPPCRKEMTKNQVSLTCLVKGFYPSDIAVEWESNGQPENNYKTTPPVLKSDGSFFLYSKLTVDKSRWQQGNVFSCSVMHEALHNHYTQKSLSLSPGK

SEQ ID NO: 290 - protein, 233 aa, Artificial Sequence
  source: /note="Description of Artificial Sequence: Synthetic polypeptide"
MDMRVPAQLLGLLLLWLRGARCGPSVFLFPPKPKDTLMISRTPEVTCVVVDVSHEDPEVKFNWYVDGVEVHNAKTKPREEQYNSTYRVVSVLTVLHQDWLNGKEYKCKVSNKALPAPIEKTISKAKGQPREPQVYTLPPCRKEMTKNQVSLTCLVKGFYPSDIAVEWESNGQPENNYKTTPPVLKSDGSFFLYSKLTVDKSRWQQGNVFSCSVMHEALHNHYTQKSLSLSPGK

SEQ ID NO: 291 - protein, 319 aa, Artificial Sequence
  source: /note="Description of Artificial Sequence: Synthetic polypeptide"
GPSVFLFPPKPKDTLMISRTPEVTCVVVDVSHEDPEVKFNWYVDGVEVHNAKTKPREEQYNSTYRVVSVLTVLHQDWLNGKEYKCKVSNKALPAPIEKTISKAKGQPREPQVCTLPPSREEMTKNQVSLTCLVKGFYPSDIAVEWESNGQPENNYDTTPPVLDSDGSFFLYSDLTVDKSRWQQGNVFSCSVMHEALHNHYTQKSLSLSPGGDHCPLGPGRCCRLHTVRASLEDLGWADWVLSPREVQVTMCIGACPSQFRAANMHAQIKTSLHRLKPDTVPAPCCVPASYNPMVLIQKTDTGVSLQTYDDLLAKDCHCI

SEQ ID NO: 292 - protein, 341 aa, Artificial Sequence
  source: /note="Description of Artificial Sequence: Synthetic polypeptide"
MDMRVPAQLLGLLLLWLRGARCGPSVFLFPPKPKDTLMISRTPEVTCVVVDVSHEDPEVKFNWYVDGVEVHNAKTKPREEQYNSTYRVVSVLTVLHQDWLNGKEYKCKVSNKALPAPIEKTISKAKGQPREPQVCTLPPSREEMTKNQVSLTCLVKGFYPSDIAVEWESNGQPENNYDTTPPVLDSDGSFFLYSDLTVDKSRWQQGNVFSCSVMHEALHNHYTQKSLSLSPGGDHCPLGPGRCCRLHTVRASLEDLGWADWVLSPREVQVTMCIGACPSQFRAANMHAQIKTSLHRLKPDTVPAPCCVPASYNPMVLIQKTDTGVSLQTYDDLLAKDCHCI

SEQ ID NO: 293 - protein, 210 aa, Artificial Sequence
  source: /note="Description of Artificial Sequence: Synthetic polypeptide"
GPSVFLFPPKPKDTLMISRTPEVTCVVVDVSHEDPEVKFNWYVDGVEVHNAKTKPREEQYNSTYRVVSVLTVLHQDWLNGKEYKCKVSNKALPAPIEKTISKAKGQPREPQVCTLPPSREEMTKNQVSLTCLVKGFYPSDIAVEWESNGQPENNYDTTPPVLDSDGSFFLYSDLTVDKSRWQQGNVFSCSVMHEALHNHYTQKSLSLSPG

SEQ ID NO: 294 - protein, 210 aa, Artificial Sequence
  source: /note="Description of Artificial Sequence: Synthetic polypeptide"
GPSVFLFPPKPKDTLMISRTPEVTCVVVDVSHEDPEVKFNWYVDGVEVHNAKTKPREEQYNSTYRVVSVLTVLHQDWLNGKEYKCKVSNKALPAPIEKTISKAKGQPREPQVYTLPPCRKEMTKNQVSLTCLVKGFYPSDIAVEWESNGQPENNYKTTPPVLKSDGSFFLYSKLTVDKSRWQQGNVFSCSVMHEALHNHYTQKSLSLSPG

SEQ ID NO: 295 - protein, 322 aa, Artificial Sequence
  source: /note="Description of Artificial Sequence: Synthetic polypeptide"
GPSVFLFPPKPKDTLMISRTPEVTCVVVDVSHEDPEVKFNWYVDGVEVHNAKTKPREEQYNSTYRVVSVLTVLHQDWLNGKEYKCKVSNKALPAPIEKTISKAKGQPREPQVCTLPPSREEMTKNQVSLTCLVKGFYPSDIAVEWESNGQPENNYDTTPPVLDSDGSFFLYSDLTVDKSRWQQGNVFSCSVMHEALHNHYTQKSLSLSPGARDGDHCPLGPGRCCRLHTVRASLEDLGWADWVLSPREVQVTMCIGACPSQFRAANMHAQIKTSLHRLKPDTVPAPCCVPASYNPMVLIQKTDTGVSLQTYDDLLAKDCHCI

SEQ ID NO: 296 - protein, 344 aa, Artificial Sequence
  source: /note="Description of Artificial Sequence: Synthetic polypeptide"
MDMRVPAQLLGLLLLWLRGARCGPSVFLFPPKPKDTLMISRTPEVTCVVVDVSHEDPEVKFNWYVDGVEVHNAKTKPREEQYNSTYRVVSVLTVLHQDWLNGKEYKCKVSNKALPAPIEKTISKAKGQPREPQVCTLPPSREEMTKNQVSLTCLVKGFYPSDIAVEWESNGQPENNYDTTPPVLDSDGSFFLYSDLTVDKSRWQQGNVFSCSVMHEALHNHYTQKSLSLSPGARDGDHCPLGPGRCCRLHTVRASLEDLGWADWVLSPREVQVTMCIGACPSQFRAANMHAQIKTSLHRLKPDTVPAPCCVPASYNPMVLIQKTDTGVSLQTYDDLLAKDCHCI

SEQ ID NO: 297 - protein, 328 aa, Artificial Sequence
  source: /note="Description of Artificial Sequence: Synthetic polypeptide"
APELLGGPSVFLFPPKPKDTLMISRTPEVTCVVVDVSHEDPEVKFNWYVDGVEVHNAKTKPREEQYGSTYRVVSVLTVLHQDWLNGKEYKCKVSNKALPAPIEKTISKAKGQPREPQVTTLPPSREEMTKNQVSLTCLVKGFYPSDIAVEWESNGQPENNYDTTPPVLDSDGSFFLYSDLTVDKSRWQQGNVFSCSVMHEALHNHYTQKSLSLSPGARNGDHCPLGPGRCCRLHTVRASLEDLGWADWVLSPREVQVTMCIGACPSQFRAANMHAQIKTSLHRLKPDTVPAPCCVPASYNPMVLIQKTDTGVSLQTYDDLLAKDCHCI

SEQ ID NO: 298 - protein, 348 aa, Artificial Sequence
  source: /note="Description of Artificial Sequence: Synthetic polypeptide"
APELLGGPSVFLFPPKPKDTLMISRTPEVTCVVVDVSHEDPEVKFNWYVDGVEVHNAKTKPREEQYGSTYRVVSVLTVLHQDWLNGKEYKCKVSNKALPAPIEKTISKAKGQPREPQVTTLPPSREEMTKNQVSLTCLVKGFYPSDIAVEWESNGQPENNYDTTPPVLDSDGSFFLYSDLTVDKSRWQQGNVFSCSVMHEALHNHYTQKSLSLSPGGGGGSGGGGSGGGGSGGGGSARNGDHCPLGPGRCCRLHTVRASLEDLGWADWVLSPREVQVTMCIGACPSQFRAANMHAQIKTSLHRLKPDTVPAPCCVPASYNPMVLIQKTDTGVSLQTYDDLLAKDCHCI

SEQ ID NO: 299 - protein, 332 aa, Artificial Sequence
  source: /note="Description of Artificial Sequence: Synthetic polypeptide"
APELLGGPSVFLFPPKPKDTLMISRTPEVTCVVVDVSHEDPEVKFNWYVDGVEVHNAKTKPREEQYGSTYRVVSVLTVLHQDWLNGKEYKCKVSNKALPAPIEKTISKAKGQPREPQVTTLPPSREEMTKNQVSLTCLVKGFYPSDIAVEWESNGQPENNYDTTPPVLDSDGSFFLYSDLTVDKSRWQQGNVFSCSVMHEALHNHYTQKSLSLSPGGGGGARNGDHCPLGPGRCCRLHTVRASLEDLGWADWVLSPREVQVTMCIGACPSQFRAANMHAQIKTSLHRLKPDTVPAPCCVPASYNPMVLIQKTDTGVSLQTYDDLLAKDCHCI

SEQ ID NO: 300 - protein, 15 aa, Artificial Sequence
  source: /note="Description of Artificial Sequence: Synthetic linker"
GGGGSGGGGSGGGGS

SEQ ID NO: 301 - protein, 4 aa, Artificial Sequence
  source: /note="Description of Artificial Sequence: Synthetic linker"
GGGA

SEQ ID NO: 302 - protein, 7 aa, Artificial Sequence
  source: /note="Description of Artificial Sequence: Synthetic peptide"
RGRRRAR

SEQ ID NO: 303 - protein, 100 aa, Artificial Sequence
  source: /note="Description of Artificial Sequence: Synthetic linker"
  misc_feature (1)..(100): /note="This sequence may encompass 1-20, preferably 1-4, 'Gly Gly Gly Gly Ser' repeating units wherein some positions may be absent"
  source: /note="See specification as filed for detailed description of substitutions and preferred embodiments"
GGGGSGGGGSGGGGSGGGGSGGGGSGGGGSGGGGSGGGGSGGGGSGGGGSGGGGSGGGGSGGGGSGGGGSGGGGSGGGGSGGGGSGGGGSGGGGSGGGGS

SEQ ID NO: 304 - protein, 100 aa, Artificial Sequence
  source: /note="Description of Artificial Sequence: Synthetic linker"
  misc_feature (1)..(100): /note="This sequence may encompass 1-20, preferably 1-4, 'Gly Pro Pro Gly Ser' repeating units wherein some positions may be absent"
  source: /note="See specification as filed for detailed description of substitutions and preferred embodiments"
GPPGSGPPGSGPPGSGPPGSGPPGSGPPGSGPPGSGPPGSGPPGSGPPGSGPPGSGPPGSGPPGSGPPGSGPPGSGPPGSGPPGSGPPGSGPPGSGPPGS

SEQ ID NO: 305 - protein, 100 aa, Artificial Sequence
  source: /note="Description of Artificial Sequence: Synthetic linker"
  misc_feature (1)..(100): /note="This sequence may encompass 1-20 'Gly Ser Gly Gly Gly' repeating units wherein some positions may be absent"
  source: /note="See specification as filed for detailed description of substitutions and preferred embodiments"
GSGGGGSGGGGSGGGGSGGGGSGGGGSGGGGSGGGGSGGGGSGGGGSGGGGSGGGGSGGGGSGGGGSGGGGSGGGGSGGGGSGGGGSGGGGSGGGGSGGG

SEQ ID NO: 306 - protein, 5 aa, Artificial Sequence
  source: /note="Description of Artificial Sequence: Synthetic linker"
GSGGG

SEQ ID NO: 307 - protein, 4 aa, Artificial Sequence
  source: /note="Description of Artificial Sequence: Synthetic linker"
GSGG

SEQ ID NO: 308 - protein, 80 aa, Artificial Sequence
  source: /note="Description of Artificial Sequence: Synthetic linker"
  misc_feature (1)..(80): /note="This sequence may encompass 1-20 'Ser Gly Gly Gly' repeating units wherein some positions may be absent"
  source: /note="See specification as filed for detailed description of substitutions and preferred embodiments"
SGGGSGGGSGGGSGGGSGGGSGGGSGGGSGGGSGGGSGGGSGGGSGGGSGGGSGGGSGGGSGGGSGGGSGGGSGGGSGGG

SEQ ID NO: 309 - protein, 5 aa, Artificial Sequence
  source: /note="Description of Artificial Sequence: Synthetic linker"
GPPGS

SEQ ID NO: 310 - protein, 5 aa, Artificial Sequence
  source: /note="Description of Artificial Sequence: Synthetic linker"
GGGGS

SEQ ID NO: 311 - protein, 4 aa, Artificial Sequence
  source: /note="Description of Artificial Sequence: Synthetic linker"
GGGS

SEQ ID NO: 312 - protein, 3 aa, Artificial Sequence
  source: /note="Description of Artificial Sequence: Synthetic linker"
GGS

SEQ ID NO: 313 - protein, 2 aa, Artificial Sequence
  source: /note="Description of Artificial Sequence: Synthetic linker"
GS

SEQ ID NO: 314 - protein, 5 aa, Artificial Sequence
  source: /note="Description of Artificial Sequence: Synthetic linker"
SGGGG

SEQ ID NO: 315 - protein, 4 aa, Artificial Sequence
  source: /note="Description of Artificial Sequence: Synthetic linker"
SGGG

SEQ ID NO: 316 - protein, 3 aa, Artificial Sequence
  source: /note="Description of Artificial Sequence: Synthetic linker"
SGG

SEQ ID NO: 317 - protein, 2 aa, Artificial Sequence
  source: /note="Description of Artificial Sequence: Synthetic linker"
SG

SEQ ID NO: 318 - protein, 5 aa, Artificial Sequence
  source: /note="Description of Artificial Sequence: Synthetic linker"
GGGGA

SEQ ID NO: 319 - protein, 100 aa, Artificial Sequence
  source: /note="Description of Artificial Sequence: Synthetic polypeptide"
  misc_feature (1)..(100): /note="This sequence may encompass 1-20 'Glu Ala Ala Ala Lys' repeating units wherein some positions may be absent"
  source: /note="See specification as filed for detailed description of substitutions and preferred embodiments"
EAAAKEAAAKEAAAKEAAAKEAAAKEAAAKEAAAKEAAAKEAAAKEAAAKEAAAKEAAAKEAAAKEAAAKEAAAKEAAAKEAAAKEAAAKEAAAKEAAAK

SEQ ID NO: 320 - protein, 112 aa, Artificial Sequence; identical to SEQ ID NO: 41
  source: /note="Description of Artificial Sequence: Synthetic polypeptide"

SEQ ID NO: 321 - protein, 119 aa, Artificial Sequence
  source: /note="Description of Artificial Sequence: Synthetic polypeptide"
MHHHHHHARNGDHCPLGPGRCCRLHTVRASLEDLGWADWVLSPREVQVTMCIGACPSQFRAANMHAQIKTSLHRLKPDTVPAPCCVPASYNPMVLIQKTDTGVSLQTYDDLLAKDCHCI

SEQ ID NO: 322 - protein, 120 aa, Artificial Sequence
  source: /note="Description of Artificial Sequence: Synthetic polypeptide"
MHHHHHHMARNGDHCPLGPGRCCRLHTVRASLEDLGWADWVLSPREVQVTMCIGACPSQFRAANMHAQIKTSLHRLKPDTVPAPCCVPASYNPMVLIQKTDTGVSLQTYDDLLAKDCHCI

SEQ ID NO: 323 - protein, 120 aa, Artificial Sequence
  source: /note="Description of Artificial Sequence: Synthetic polypeptide"
MHHHHHHAHARDGCPLGEGRCCRLQSLRASLQDLGWANWVVAPRELDVRMCVGACPSQFRSANTHAQMQARLHGLNPDAAPAPCCVPASYEPVVLMHQDSDGRVSLTPFDDLVAKDCHCV

SEQ ID NO: 324 - protein, 112 aa, Artificial Sequence
  source: /note="Description of Artificial Sequence: Synthetic polypeptide"
MHNGDHCPLGPGRCCRLHTVRASLEDLGWADWVLSPREVQVTMCIGACPSQFRAANMHAQIKTSLHRLKPDTVPAPCCVPASYNPMVLIQKTDTGVSLQTYDDLLAKDCHCI

SEQ ID NO: 325 - protein, 112 aa, Artificial Sequence
  source: /note="Description of Artificial Sequence: Synthetic polypeptide"
MHAGDHCPLGPGRCCRLHTVRASLEDLGWADWVLSPREVQVTMCIGACPSQFRAANMHAQIKTSLHRLKPDTVPAPCCVPASYNPMVLIQKTDTGVSLQTYDDLLAKDCHCI

SEQ ID NO: 326 - protein, 112 aa, Artificial Sequence
  source: /note="Description of Artificial Sequence: Synthetic polypeptide"
AHNGDHCPLGPGRCCRLHTVRASLEDLGWADWVLSPREVQVTMCIGACPSQFRAANMHAQIKTSLHRLKPDTVPAPCCVPASYNPMVLIQKTDTGVSLQTYDDLLAKDCHCI

SEQ ID NO: 327 - protein, 698 aa, Artificial Sequence; identical to SEQ ID NO: 11
  source: /note="Description of Artificial Sequence: Synthetic polypeptide"

SEQ ID NO: 328 - protein, 712 aa, Artificial Sequence; identical to SEQ ID NO: 14
  source: /note="Description of Artificial Sequence: Synthetic polypeptide"

SEQ ID NO: 329 - protein, 702 aa, Artificial Sequence; identical to SEQ ID NO: 15
  source: /note="Description of Artificial Sequence: Synthetic polypeptide"

SEQ ID NO: 330 - protein, 702 aa, Artificial Sequence; identical to SEQ ID NO: 16
  source: /note="Description of Artificial Sequence: Synthetic polypeptide"

SEQ ID NO: 331 - protein, 697 aa, Artificial Sequence; identical to SEQ ID NO: 17
  source: /note="Description of Artificial Sequence: Synthetic polypeptide"

SEQ ID NO: 332 - protein, 712 aa, Artificial Sequence; identical to SEQ ID NO: 20
  source: /note="Description of Artificial Sequence: Synthetic polypeptide"

SEQ ID NO: 333 - protein, 712 aa, Artificial Sequence; identical to SEQ ID NO: 21
  source: /note="Description of Artificial Sequence: Synthetic polypeptide"

SEQ ID NO: 334 - protein, 712 aa, Artificial Sequence; identical to SEQ ID NO: 22
  source: /note="Description of Artificial Sequence: Synthetic polypeptide"

SEQ ID NO: 335 - protein, 4 aa, Artificial Sequence
  source: /note="Description of Artificial Sequence: Synthetic linker"
GGGG

SEQ ID NO: 336 - protein, 5 aa, Artificial Sequence
  source: /note="Description of Artificial Sequence: Synthetic linker"
GGGGG

SEQ ID NO: 337 - protein, 23 aa, Artificial Sequence
  source: /note="Description of Artificial Sequence: Synthetic linker"
GGSSEAAEAAEAAEAAEAAEAAE

1. A method of treating a disease or disorder selected from non-alcoholic fatty liver disease (NAFLD), non-alcoholic steatohepatitis (NASH), end-stage liver disease, hepatic steatosis (fatty liver), liver fibrosis, liver inflammation, liver cirrhosis, primary biliary cirrhosis (PBC), and hepatocellular carcinoma (HCC) by administering a therapeutically effective amount of a GDF15 therapeutic agent comprising one or more of a GDF15 protein, variant, mutant, fusion, or conjugate.

2. The method of claim 1, wherein the GDF15 therapeutic agent is GDF15 conjugate.

3. The method of claim 1, wherein the GDF15 therapeutic agent is an HSA-GDF15 fusion protein or an Fc-GDF15 fusion protein.

4. The method of claim 1, wherein the GDF15 therapeutic agent is selected from Table 1.

5. The method of claim 1, wherein the disease or disorder is selected from non-alcoholic fatty liver disease (NAFLD) and non-alcoholic steatohepatitis (NASH) by administering a therapeutically effective amount of a GDF15 therapeutic agent comprising one or more of a GDF15 protein, variant, mutant, fusion, or conjugate.

6. The method of claim 5, wherein the GDF15 therapeutic agent is a fatty acid-GDF15 conjugate or a PEG-GDF15 conjugate.

7. The method of claim 5, wherein the GDF15 therapeutic agent is an HSA-GDF15 fusion protein or an Fc-GDF15 fusion protein.

8. The method of claim 5, wherein the GDF15 therapeutic agent is selected from Table 1.

9. A method of treating a disease or disorder selected from non-alcoholic fatty liver disease (NAFLD), non-alcoholic steatohepatitis (NASH), end-stage liver disease, hepatic steatosis (fatty liver), liver fibrosis, liver inflammation, liver cirrhosis, primary biliary cirrhosis (PBC), and hepatocellular carcinoma (HCC) by administering a therapeutically effective amount of a pharmaceutical composition comprising GDF15 therapeutic agent comprising one or more of a GDF15 protein, variant, mutant, fusion, or conjugate.

10. The method of claim 9, wherein the GDF15 therapeutic agent is a fatty acid-GDF15 conjugate or a PEG-GDF15 conjugate.

11. The method of claim 9, wherein the GDF15 therapeutic agent is an HSA-GDF15 fusion protein or an Fc-GDF15 fusion protein.

12. The method of claim 9, wherein the GDF15 therapeutic agent is selected from Table 1.

13. The method of claim 9, wherein the disease or disorder is selected from non-alcoholic fatty liver disease (NAFLD) and non-alcoholic steatohepatitis (NASH) by administering a therapeutically effective amount of a pharmaceutical composition comprising GDF15 therapeutic agent comprising one or more of a GDF15 protein, variant, mutant, fusion, or conjugate.

14. The method of claim 13, wherein the GDF15 therapeutic agent is a fatty acid-GDF15 conjugate or a PEG-GDF15 conjugate.

15. The method of claim 13, wherein the GDF15 therapeutic agent is an HSA-GDF15 fusion protein or an Fc-GDF15 fusion protein.

16. The method of claim 13, wherein the GDF15 therapeutic agent is selected from Table 1.

17. The method of claim 1, wherein:
a) the GDF15 therapeutic agent does not comprise a GDF15 polypeptide comprising the amino acid sequence of SEQ ID NO: 41; or
b) the GDF15 therapeutic agent is not a fatty acid-GDF15 conjugate comprising the amino acid sequence of SEQ ID NO: 41, or
(c) the GDF15 therapeutic agent is not albumin-GDF15 fusion comprising the amino acid sequence of SEQ ID NO: 41, such as a human serum albumin-GDF15 fusion
(d) the GDF15 therapeutic is a fatty acid conjugate which does not comprise the amino sequence of:
(i)
SEQ ID NO: 41;
(ii)
(SEQ ID NO: 321)
MHHHH HHAR NGDHC PLGPG RCCRL HTVRA SLEDL GWADW
VLSPR EVQVT MCIGA CPSQF RAANM HAQIK TSLHR LKPDT
VPAPC CVPAS YNPMV LIQKT DTGVS LQTYD DLLAK DCHCI
(M-(his)₆-hGDF15 (197-308)),
(iii)
(SEQ ID NO: 322)
MHHHHHHMARNGDHCPLGPGRCCRLHTVRASLEDLGWADWVLSPREV
QVTMCIGACPSQFRAANMHAQIKTSLHRLKPDTVPAPCCVPASYNPMVL
IQKTDTGVSLQTYDDLLAKDCHCI (M-(his)₆-M-hGDF15
(197-308)),
(iv)
(SEQ ID NO: 323)
MHHHHHHAHARDGCPLGEGRCCRLQSLRASLQDLGWANWVVAPRELD
VRMCVGACPSQFRSANTHAQMQARLHGLNPDAAPAPCCVPASYEPVVL
MHQDSDGRVSLTPFDDLVAKDCHCV (M-(his)₆-dGDF15),
(v)
(SEQ ID NO: 324)
MHNGDHCPLGPGRCCRLHTVRASLEDLGWADWVLSPREVQVTMCIGAC
PSQFRAANMHAQIKTSLHRLKPDTVPAPCCVPASYNPMVLIQKTDTGVS
LQTYDDLLAKDCHCI (MH-hGDF15(199-308)),
(vi)
(SEQ ID NO: 325)
MHAGDHCPLGPGRCCRLHTVRASLEDLGWADWVLSPREVQVTMCIGAC
PSQFRAANMHAQIKTSLHRLKPDTVPAPCCVPASYNPMVLIQKTDTGVS
LQTYDDLLAKDCHCI (MHA-hGDF15(200-308)),
or
(vii)
(SEQ ID NO: 326)
AHNGDHCPLGPGRCCRLHTVRASLEDLGWADWVLSPREVQVTMCIGAC
PSQFRAANMHAQIKTSLHRLKPDTVPAPCCVPASYNPMVLIQKTDTGVS
LQTYDDLLAKDCHCI (AH-hGDF15(199-308);
or
(e) the GDF15 therapeutic agent does not comprise one of the following amino acid sequences:
(i)
(SEQ ID NO: 321)
MHHHH HHAR NGDHC PLGPG RCCRL HTVRA SLEDL GWADW
VLSPR EVQVT MCIGA CPSQF RAANM HAQIK TSLHR LKPDT
VPAPC CVPAS YNPMV LIQKT DTGVS LQTYD DLLAK DCHCI
(M-(his)₆-hGDF15 (197-308)),
(ii)
SEQ ID NO: 6,
(iii)
SEQ ID NO: 7,
(iv)
(SEQ ID NO: 322)
MHHHHHHMARNGDHCPLGPGRCCRLHTVRASLEDLGWADWVLSPREVQV
TMCIGACPSQFRAANMHAQIKTSLHRLKPDTVPAPCCVPASYNPMVLIQ
KTDTGVSLQTYDDLLAKDCHCI (M-(his)₆-M-hGDF15
(197-308)),
(v)
(SEQ ID NO: 323)
MHHHHHHAHARDGCPLGEGRCCRLQSLRASLQDLGWANWVVAPRELDVR
MCVGACPSQFRSANTHAQMQARLHGLNPDAAPAPCCVPASYEPVVLMHQ
DSDGRVSLTPFDDLVAKDCHCV (M-(his)₆-dGDF15),
(vi)
(SEQ ID NO: 324)
MHNGDHCPLGPGRCCRLHTVRASLEDLGWADWVLSPREVQVTMCIGACP
SQFRAANMHAQIKTSLHRLKPDTVPAPCCVPASYNPMVLIQKTDTGVSL
QTYDDLLAKDCHCI (MH-hGDF15(199-308)),
(vii)
(SEQ ID NO: 325)
MHAGDHCPLGPGRCCRLHTVRASLEDLGWADWVLSPREVQVTMCIGACP
SQFRAANMHAQIKTSLHRLKPDTVPAPCCVPASYNPMVLIQKTDTGVSL
QTYDDLLAKDCHCI (MHA-hGDF15(200-308)),
(viii)
SEQ ID NO: 41,
and
(ix)
(SEQ ID NO: 326)
AHNGDHCPLGPGRCCRLHTVRASLEDLGWADWVLSPREVQVTMCIGACP
SQFRAANMHAQIKTSLHRLKPDTVPAPCCVPASYNPMVLIQKTDTGVSL
QTYDDLLAKDCHCI (AH-hGDF15(199-308);
or
(f) the GDF15 therapeutic agent is a fatty acid-GDF15 conjugate which does not comprise a fatty acid according to any one of Formula A1, A2, and A3: [chemical structure]
R¹ is CO₂H or H;
R², R³ and R⁴ are independently of each other H, OH, CO₂H, —CH═CH₂ or —C═CH;
Ak is a branched C₆-C₃₀alkylene;
n, m and p are independently of each other an integer between 6 and 30; and which does not comprise tetradecanoic acid; or
(g) the GDF15 therapeutic agent is a fatty acid-GDF15 conjugate which does not comprise one or more of the following fatty acids:

[chemical structure]

[chemical structure]

[chemical structure]

[chemical structure]

18-20. (canceled)

21. The method of claim 1, wherein the GDF15 therapeutic agent comprises the amino acid sequence of any one of the following: SEQ ID NO: 5, SEQ ID NO: 6, SEQ ID NO: 7, SEQ ID NO: 8, SEQ ID NOs: 42-63, SEQ ID NO: 69-107, SEQ ID NO: 148, SEQ ID NO: 149, and SEQ ID NO: 320.

22-24. (canceled)

25. The method of claim 9, wherein:
a) the GDF15 therapeutic agent does not comprise a GDF15 polypeptide comprising the amino acid sequence of SEQ ID NO: 41; or
b) the GDF15 therapeutic agent is not a fatty acid-GDF15 conjugate comprising the amino acid sequence of SEQ ID NO: 41; or
(c) the GDF15 therapeutic agent is not albumin-GDF15 fusion comprising the amino acid sequence of SEQ ID NO: 41, such as a human serum albumin-GDF15 fusion
(d) the GDF15 therapeutic is a fatty acid conjugate which does not comprise the amino sequence of:
(i)
SEQ ID NO: 41;
(ii)
(SEQ ID NO: 321)
MHHHH HHAR NGDHC PLGPG RCCRL HTVRA SLEDL GWADW
VLSPR EVQVT MCIGA CPSQF RAANM HAQIK TSLHR LKPDT
VPAPC CVPAS YNPMV LIQKT DTGVS LQTYD DLLAK DCHCI
(M-(his)₆-hGDF15 (197-308)),
(iii)
(SEQ ID NO: 322)
MHHHHHHMARNGDHCPLGPGRCCRLHTVRASLEDLGWADWVLSPREV
QVTMCIGACPSQFRAANMHAQIKTSLHRLKPDTVPAPCCVPASYNPMVL
IQKTDTGVSLQTYDDLLAKDCHCI (M-(his)₆-M-hGDF15
(197-308)),
(iv)
(SEQ ID NO: 323)
MHHHHHHAHARDGCPLGEGRCCRLQSLRASLQDLGWANWVVAPRELD
VRMCVGACPSQFRSANTHAQMQARLHGLNPDAAPAPCCVPASYEPVVL
MHQDSDGRVSLTPFDDLVAKDCHCV (M-(his)₆-dGDF15),
(v)
(SEQ ID NO: 324)
MHNGDHCPLGPGRCCRLHTVRASLEDLGWADWVLSPREVQVTMCIGAC
PSQFRAANMEIAQIKTSLHRLKPDTVPAPCCVPASYNPMVLIQKTDTGV
SLQTYDDLLAKDCHCI (MH-hGDF15(199-308)),
(vi)
(SEQ ID NO: 325)
MHAGDHCPLGPGRCCRLHTVRASLEDLGWADWVLSPREVQVTMCIGAC
PSQFRAANMEIAQIKTSLHRLKPDTVPAPCCVPASYNPMVLIQKTDTGV
SLQTYDDLLAKDCHCI (MHA-hGDF15(200-308)),
or
(vii)
(SEQ ID NO: 326)
AHNGDHCPLGPGRCCRLHTVRASLEDLGWADWVLSPREVQVTMCIGAC
PSQFRAANMHAQIKTSLHRLKPDTVPAPCCVPASYNPMVLIQKTDTGVS
LQTYDDLLAKDCHCI (AH-hGDF15(199-308);
(e) the GDF15 therapeutic agent does not comprise one of the following amino acid sequences:
(i)
(SEQ ID NO: 321)
MHHHH HHAR NGDHC PLGPG RCCRL HTVRA SLEDL GWADW
VLSPR EVQVT MCIGA CPSQF RAANM HAQIK TSLHR LKPDT
VPAPC CVPAS YNPMV LIQKT DTGVS LQTYD DLLAK DCHCI
(M-(his)₆-hGDF15 (197-308)),
(ii)
SEQ ID NO: 6,
(iii)
SEQ ID NO: 7,
(iv)
(SEQ ID NO: 322)
MHHHHHHMARNGDHCPLGPGRCCRLHTVRASLEDLGWADWVLSPREVQV
TMCIGACPSQFRAANMHAQIKTSLHRLKPDTVPAPCCVPASYNPMVLIQK
TDTGVSLQTYDDLLAKDCHCI (M-(his)₆-M-hGDF15
(197-308)),
(v)
(SEQ ID NO: 323)
MHHHHHHAHARDGCPLGEGRCCRLQSLRASLQDLGWANWVVAPRELDVR
MCVGACPSQFRSANTHAQMQARLHGLNPDAAPAPCCVPASYEPVVLMHR
QDSDGRVSLTPFDDLVAKDCHCV (M-(his)₆-dGDF15),
(vi)
(SEQ ID NO: 324)
MHNGDHCPLGPGRCCRLHTVRASLEDLGWADWVLSPREVQVTMCIGACPS
QFRAANMHAQIKTSLHRLKPDTVPAPCCVPASYNPMVLIQKTDTGVSLQ
TYDDLLAKDCHCI (MH-hGDF15(199-308)),
(vii)
(SEQ ID NO: 325)
MHAGDHCPLGPGRCCRLHTVRASLEDLGWADWVLSPREVQVTMCIGACP
SQFRAANMHAQIKTSLHRLKPDTVPAPCCVPASYNPMVLIQKTDTGVSL
QTYDDLLAKDCHCI (MHA-hGDF15(200-308)),
(viii)
SEQ ID NO: 41,
and
(ix)
(SEQ ID NO: 326)
AHNGDHCPLGPGRCCRLHTVRASLEDLGWADWVLSPREVQVTMCIGACP
SQFRAANMHAQIKTSLHRLKPDTVPAPCCVPASYNPMVLIQKTDTGVSL
QTYDDLLAKDCHCI (AH-hGDF15(199-308);
or
(f) the GDF15 therapeutic agent is a fatty acid-GDF15 conjugate which does not comprise a fatty acid according to any one of Formula A1, A2, and A3: [chemical structure]
R¹ is CO₂H or H;
R², R³ and R⁴ are independently of each other H, OH, CO₂H, —CH═CH₂ or —C═CH;
Ak is a branched C₆-C₃₀alkylene;
n, m and p are independently of each other an integer between 6 and 30; and which does not comprise tetradecanoic acid; or
(g) the GDF15 therapeutic agent is a fatty acid-GDF15 conjugate which does not comprise one or more of the following fatty acids:

[chemical structure]

[chemical structure]

[chemical structure]

[chemical structure]

26. The method of claim 9, wherein the GDF15 therapeutic agent comprises the amino acid sequence of any one of the following: SEQ ID NO: 5, SEQ ID NO: 6, SEQ ID NO: 7, SEQ ID NO: 8, SEQ ID NOs: 42-63, SEQ ID NO: 69-107, SEQ ID NO: 148, SEQ ID NO: 149, and SEQ ID NO: 320.
